(19) United States
(12) Patent Application Publication
(10) Pub. No.: US 2017/0240932 A1
(43) Pub. Date: Aug. 24, 2017

(54) Recombinant Yeast Producing 3-Hydroxypropionic Acid and Method for Producing 3-Hydroxypropionic Acid Using the Same

(71) Applicant: SK Innovation Co., Ltd., Seoul (KR)

(72) Inventors: Joong Min Park, Seoul (KR); Jae Yeon Park, Seoul (KR); Woo Chan Park, Sejong-si (KR); Sang Min Lee, Seoul (KR); Young Bin Seo, Seoul (KR); Merja Oja, Espoo (FI); Outi Koivistoinen, Espoo (FI); Andrew Conley, Espoo (FI); Marja Ilmen, Helsinki (FI); Laura Ruohonen, Helsinki (FI); Paula Jouhten, Espoo (FI)

(21) Appl. No.: 15/506,981

(22) PCT Filed: Aug. 28, 2015
(86) PCT No.: PCT/KR2015/009061

§ 371 Date: Feb. 27, 2017

(30) Foreign Application Priority Data
Aug. 29, 2014 (KR) 10-2014-0114505

(51) Int. Cl. C12P 7/42; C12N 1/16; C12N 9/04; C12N 9/02; C12N 9/00

(52) U.S. Cl. CPC C12P 7/42; C12N 9/0008; C12N 9/93; C12Y 102/01075; C12N 9/0006; C12Y 102/0101; C12Y 604/01002; C12Y 101/01059; C12N 1/16

(57) ABSTRACT

Provided are a recombinant yeast producing 3-hydroxypropionic acid (3-HP) and a method for producing 3-HP using the same, more particularly, a recombinant yeast producing 3-HP, comprising an exogenous AADH gene; an endogenous or exogenous ACC gene; an exogenous MCR gene; and an exogenous HPDH gene, and producing 3-HP through [Pyruvate Acetaldehyde→Acetyl-CoA Malonyl-CoA Malonate semialdehyde 3-HP] biosynthesis pathway, and a method for producing 3-HP using the same.

### TECHNICAL FIELD

[0001] The present invention relates to a recombinant yeast producing 3-hydroxypropionic acid (3-HP) and a method for producing 3-HP using the same, and more particularly, to a recombinant yeast producing 3-HP, comprising an exogenous gene encoding AADH; an endo- or exo-genous gene encoding ACC; an exogenous gene encoding MCR; and an exogenous gene encoding HPDH, and producing 3-HP through the [Pyruvate Acetaldehyde→Acetyl-CoA Malonyl-CoA Malonate semialdehyde 3-HP] biosynthesis pathway, and a method for producing 3-HP using the same.

### BACKGROUND ART

[0002] 3-HP (3-hydroxypropionic acid, C3) is an isomer of lactic acid (2-hydroxypropionic acid) and it has a carboxylic acid group and a hydroxyl group at both ends thereof, and thereby it is a useful material capable of being converted into various chemicals such as 1,3-propanediol, acrylic acid, acrylamide, a polymer, and the like. Actually, due to the above mentioned reason, 3-HP was selected as one of the promising chemicals that can be produced from biomass by the U.S. Department of Energy in 2004. Particularly, acrylic acid could be a major applied form of 3-HP, as highly marketable material used in a coating material, an adhesive, an additive, a diaper, or the like. 3-HP may be theoretically produced from various biomass such as glucose through fermentation at a yield of 100%, and a fermentation process using microorganisms is suitable for satisfying the demand for an eco-friendly and renewable material.

[0003] There is yet no case of commercial production of 3-HP using biomass, but research into various methods has been conducted, and the securing of an economical 3-HP producing strain is emerging as a major obstacle. Bacteria are known as representative microorganisms producing organic acids and widely used in industry such as a food industry, or the like. However, there are disadvantages for applying production of organic acid using industrial bacteria such as E. coli to large-scale chemical industry such as 3-HP production. As the production amount of organic acid is increased, a hydrogenated form of acid is increased and acidity is increased (pH is decreased), and thereby activity of most of the E. coli is decreased. In the case of producing an organic acid at a high concentration, bacteria require a base such as sodium hydroxide (NaOH) and ammonium hydroxide (NH₄OH) for maintaining a neutral pH. This causes an increase in the cost of the fermentation process depending on an injected base, makes an extraction and separation process difficult, or significantly increases the cost.

[0004] In a recent case of application of producing organic acid to chemical industry, an organic acid is produced from glucose using yeast. Yeast has high resistance against an organic acid as compared to bacteria, thus the activity of the yeast is not significantly inhibited even at a high acidity (low pH) making yeast as more suitable host for producing the organic acid. Particularly, yeast has been conventionally widely used as an industrial biocatalyst for producing spirits, industrial ethanol, or the like, and may be mass-cultured and may not be contaminated with bacteriophages, such that applicability of the yeast in the chemical industry is more excellent as compared to bacteria. Yeast has advantages for producing an organic acid, but there are several disadvantages for using the yeast to produce an organic acid such as 3-HP. First, it is more difficult to genetically modify yeast as compared to bacteria, and in order to express a specific metabolic enzyme, the sub-cellular location for expression of the metabolic pathway along with the specific metabolic enzyme should be identified due to the shape of the cells divided into intracellular structural bodies such as mitochondria, peroxisomes, or the like, unlike bacteria. For example, a representative metabolic intermediate such as acetyl-CoA is mainly produced in the mitochondria in yeasts. However, if a target product is produced in the cytosol, a method for producing acetyl-CoA in the cytosol is also required. In addition, since there is large number of different yeast in the fungal kingdom and all of the yeast do not satisfy requirements for high productivity, resistance against an organic acid and massive cultivation, a host suitable for producing the organic acid should be effectively selected.

[0005] It is known that some yeast effectively produce ethanol from glucose, which is a hexose, and some yeast species also produce an organic acid. At the time of modification for producing a target product using microorganisms, it is important to maintain an entire balance of oxidation and reduction for a metabolic reaction, and also, a metabolic reaction of fermenting ethanol from glucose is a suitably maintained reaction. Even in the case of genetically modifying yeast to produce an organic acid, the balance as described above should be appropriately maintained, and in a case of producing lactic acid through modification of yeast, balanced introduction of lactic acid dehydrogenase (LDH) of another reduction reaction for complementing a reduction reaction of producing ethanol from acetaldehyde is important.

[0006] It is known that a small amount of 3-HP is produced in a small number of microorganisms such as Chloroflexus aurantiacus, and 3-HP is partially formed from a decomposition process of dimethylsulfoniopropionate in microorganisms such as Alcaligenes faecalis or a decomposition process of uracil in yeast. Research for 3-HP metabolic pathways and the corresponding enzymes have been conducted through discovery of 3-HP present in nature as described above, and based on the research, recently, research for a technology of producing 3-HP or a PHA, which is a polymer form of 3-HP, by introducing a gene required for 3-HP biosynthesis in E. coli has been conducted. In addition, in order to maximize productivity and production yield of 3-HP which is only present as a metabolic intermediate or produced only at a small amount in nature, technologies such as a metabolic engineering technology, a systems biology technology, a synthetic biology technology, or the like, have to be utilized.

[0007] According to the development of the metabolic engineering technology, it becomes possible to predict production pathways of various materials using microorganisms, and a pathway for producing 3-HP from glucose may be roughly divided into an acryloyl-CoA pathway, a β-alanine pathway, a malonyl-CoA pathway, and a glycerol pathway depending on metabolic intermediates.

[0008] The acryloyl-CoA pathway means a metabolic pathway of converting pyruvate or phosphoenol pyruvate (PEP) obtained from the glycolysis of glucose into acryloyl-CoA via lactate or β-alanine and then converting the acryloyl-CoA into 3-HP through a hydration reaction and a reduction reaction (pyruvate or PEP>lactate or β-alanine→acryloyl-CoA>3-HP). Acryloyl-CoA is a metabolite observed during the decomposition process of propionic acid, and since the Gibb's free energy value for formation of the metabolite is positive, a forward reaction is an unfavourable reaction. In addition, substrate specificity of acryloyl-CoA thioesterases is low, such that the acryloyl-CoA pathway is not suitable as the metabolic pathway for mass-producing 3-HP.

[0009] The β-alanine pathway means a metabolic pathway of converting pyruvate or oxaloacetate into amino acid by a transamination reaction and finally conversion into 3-HP via β-alanine by a transamination reaction (pyruvate or oxaloacetate>amino acid→β-alanine 3-HP; US 2012/0135481A1). Since the transamination reaction of β-alanine to 3-HP proceeds via malonate semialdehyde which is highly toxic to microorganisms, a 3-HP dehydrogenase having a high activity is required. In addition, generally, since the transamination reaction forms a radical form of an amino acid molecular structure in a steady-state, an enzyme of this reaction has a structure for alleviating reactivity of the radical. Since this radical has strong reactivity with oxygen, for a smooth transamination reaction, anaerobic conditions or a coenzyme for stabilizing radical molecules are essentially required.

[0010] The malonyl-CoA pathway is a metabolic pathway of converting acetyl-CoA into malonyl-CoA by carboxylation and then converting malonyl-CoA into 3-HP by a reduction reaction (acetyl-CoA malonyl-CoA→3-HP), and the glycerol pathway is a metabolic pathway of converting glucose into glycerol, converting glycerol into 3-hydroxypropionaldehyde by a dehydration reaction, and then converting 3-hydroxypropionaldehyde into 3-HP (glucose glycerol 3-hydroxypropionaldehyde 3-HP). Since the malonyl-CoA pathway and the glycerol pathway proceed through an intermediate generally produced by microorganisms such as E. coli, or the like, these pathways have been mainly studied as the 3-HP production pathway (US 2013/0071893 A1). Since malonyl-CoA may be converted into 3-HP by malonate reductase and 3-HP dehydrogenase, and glycerol may be converted into 3-HP by glycerol dehydratase and aldehyde dehydrogenase, a method for converting glucose or glycerol into 3-HP using modified E. coli has been well known. A dehydration reaction of glycerol, which is a reaction accompanied with radicals similarly to the transamination reaction, essentially requires coenzyme B12 for performing the reaction in the presence of oxygen.

[0011] In view of industrial fermentation, since it is difficult to use a coenzyme such as coenzyme B12 as a material of a culture medium due to its cost, and microorganisms such as yeast may not biosynthesize or absorb the corresponding material in cells, the β-alanine pathway or glycerol pathway is not suitable as the metabolic pathway for producing 3-HP using yeast. Recently, research modifying the key enzymes for overcoming this problem has been reported. [U.S. Pat. No. 7,655,451 B2]

[0012] Malonyl-CoA is synthesized from acetyl-CoA in the cytosol, and can thereby be reduced to 3-HP. In the case of bacteria such as E. coli, acetyl-CoA is formed from pyruvate in the cytosol, and can thereby be used as a substrate of the TCA cycle or other metabolic reaction. However, as described above, in yeast having independent sub-cellular compartments, generally, acetyl-CoA is synthesized in the mitochondria and is used as a substrate of the TCA cycle, and acetyl-CoA in the cytosol is produced via acetate producing reaction, which is a side-reaction of an ethanol production reaction, or a citric acid circulation reaction. All of the reactions of producing acetyl-CoA from acetate or citric acid are reactions consuming ATP, and since yeast further consumes energy in order to obtain acetyl-CoA in cytosol as compared to bacteria, yeast may be disadvantageous in view of energetics.

[0013] In yeast, environments such as the reduction state of the cytosol, folding after protein synthesis, codon usage, and the like, are different from those in bacteria, such that at the time of expressing an exogenous enzyme derived from bacteria, an activity thereof may not be exhibited or the activity may be significantly decreased. In addition, since the activity may be significantly changed by the presence or absence of oxygen or other metal ions, even in the case of exogenous enzymes having the same functions, expression results thereof in yeast may be different according to the origins of the enzymes. Actually, in the case of xylose isomerase (XI), which is an important enzyme of xylose metabolism, at the time of expressing XI derived from bacteria in yeast, mostly, an activity thereof was significantly low, but it was shown that yeast was successfully modified so as to perform xylose metabolism at a relatively high activity by introducing XI derived from anaerobic fungus. Thus, in the case of introducing a metabolic pathway derived from bacteria or Archaea such as the malonyl-CoA pathway in yeast, a gene having a high activity should be secured through genes performing the same functions with various origins.

[0014] There are various papers and patents associated with a method of genetically modifying Saccharomyces cerevisiae among various yeast strains to produce 3-HP, but in the case of Saccharomyces cerevisiae, since 3-HP is produced by the [pyruvic acid acetaldehyde→acetic acid acetyl-CoA malonyl-CoA malonate semialdehyde 3-HP] pathway, there are problems that this metabolic pathway to produce 3-HP is complicated, and productivity of 3-HP is relatively low (US 2010/0248233A1; Y. Chen et al., Metabolic Engineering, 22:104-109, 2014).

[0015] Accordingly, as a result of an effort to solve the above-mentioned problems, in order to overcome the disadvantage of yeast where ATP is consumed in a process of obtaining acetyl-CoA in cytosol, the present inventors conceived a shorter metabolic pathway of [Pyruvate Acetaldehyde→Acetyl-CoA Malonyl-CoA Malonate semialdehyde 3-HP], which is directly converting acetaldehyde into acetyl-CoA without passing through an acetate intermediate, and confirmed that in the case of using a recombinant yeast comprising this pathway, unlike the case of using E. coli, not only the use of pH adjusting materials is decreased, and thereby production of salts is decreased, but also 3-HP may be produced from biomass at a high concentration and a high yield even at a low pH, thereby completing the present invention.

### DISCLOSURE OF INVENTION

### Technical Problem

[0016] An object of the present invention is to provide a recombinant yeast comprising an active 3-HP biosynthetic pathway of [Pyruvate Acetaldehyde→Acetyl-CoA Malonyl-CoA Malonate semialdehyde 3-HP], converting acetaldehyde directly to acetyl-CoA and not via acetate.

[0017] Another object of the present invention is to provide a method for producing 3-HP using the recombinant yeast.

### Solution to Problem

[0018] In order to achieve the foregoing objects, the present invention provides a recombinant yeast comprising an active 3-HP biosynthetic pathway of [Pyruvate Acetaldehyde→Acetyl-CoA Malonyl-CoA Malonate semialdehyde 3-HP], wherein the yeast comprises: an exogenous gene encoding AADH; an endo- or exo-genous gene encoding ACC; an exogenous gene encoding MCR; and an exogenous gene encoding HPDH.

[0019] In the present invention, said yeast is acid-resistant and selected from the group consisting of for example the genera Saccharomyces, Kazachstania and Candida. Yeast species of particular interest include Saccharomyces cerevisiae, Kazachstania exigua, Kazachstania bulderi, and Candida humilis where species are not limited only by those.

[0020] In addition, the present invention provides a method of preparing 3-HP comprising: (a) culturing the recombinant yeast of any one of claims 1-10 in a medium including at least one carbon source, thereby producing 3-HP; and (b) isolating 3-HP from the culture.

### BRIEF DESCRIPTION OF DRAWINGS

[0021] FIG. 1 shows a pathway of producing 3-HP from glucose of the recombinant yeast of the present invention (modified malonyl-CoA metabolic pathway) and major enzymes.

[0022] FIG. 2 shows relative ranking on ACC1 activity of Acetyl-CoA carboxylase enzymes.

[0023] FIG. 3 shows results of confirming relative activity (left) and expression levels (SDS-PAGE) (right) of the archaeal MCR variants.

[0024] FIG. 4 shows yeast expression plasmids pSK-084 and pSK-085 for expressing enzymes related with 3-HP pathway.

[0025] FIG. 5 shows results of testing cultivation conditions that could effect on the 3-HP production levels.

[0026] FIG. 6 shows 3-HP production with a more established 3-HP production strain using fed-batch (tablet spiking) cultivation conditions.

### BEST MODE FOR CARRYING OUT THE INVENTION

[0027] Unless defined otherwise, all the technical and scientific terms used herein have the same meanings as those generally understood by persons skilled in the art to which the present invention pertains. Generally, the nomenclature used herein are well known and commonly employed in the art.

[0028] Generally, in yeast, since acetyl-CoA is prepared by the pathway of [acetaldehyde acetate→acetyl-CoA], and acetate is produced in cytosol of yeast, ATP is consumed by converting into AMP in the process of producing acetyl-CoA (FIG. 1; Y. Chen et al., Metabolic Engineering, 22:104-109, 2014).

[0029] However, in the present invention, a pathway where disadvantages of yeast consuming ATP is overcome and improved by directly preparing acetyl-CoA from acetaldehyde, not via acetate, in the process of producing acetyl-CoA in cytosol (FIG. 1) is designed and applied. As a result, in case of using the recombinant yeast of the present invention, it is demonstrated that 3-HP is produced in a high concentration and a high yield from glucose even at a low pH.

[0030] Therefore, in one aspect, the present invention is directed to a recombinant yeast comprising an active 3-HP biosynthetic pathway of [Pyruvate Acetaldehyde→Acetyl-CoA Malonyl-CoA Malonate semialdehyde 3-HP], wherein the yeast comprises: an exogenous gene encoding AADH; an endo- or exo-genous gene encoding ACC; an exogenous gene encoding MCR; and an exogenous gene encoding HPDH.

[0031] The 3-HP biosynthetic pathway of [Pyruvate Acetaldehyde→Acetyl-CoA Malonyl-CoA Malonate semialdehyde 3-HP] is a pathway of producing 3-HP from a carbon source such as glucose, etc. (i) “Pyruvate Acetaldehyde” means a pathway of producing acetaldehyde from pyruvate using pyruvate decarboxylase (PDC) without producing an intermediate; (ii) “Acetaldehyde Acetyl-CoA” means a pathway of producing acetyl-CoA from acetaldehyde using acetylating acetaldehyde dehydrogenase (AADH) without producing an intermediate such as acetate; (iii) “Acetyl-CoA Malonyl-CoA” means a pathway of producing malonyl-CoA from acetyl-CoA using acetyl-CoA carboxylase (ACC) without producing an intermediate; (iv) “Malonyl-CoA3-HP or Malonyl-CoA Malonate semialdehyde 3-HP” means a pathway of producing 3-HP from malonyl-CoA using bi-functional Malonyl-CoA reductase (MCR) without producing an intermediate or a pathway of producing 3-HP from malonate semialdehyde by biosynthesizing malonate semialdehyde using a mono-functional malonyl-CoA reductase (FIG. 1).

[0032] In the present invention, the PDC gene is not engineered, but engineering the PDC gene to increase the 3-HP production rate, for example, by amplifying the PDC gene present in yeast, by applying well-known prior art in the technical field, can be done.

[0033] In an exemplary embodiment of the present invention, genes encoding pathway enzymes which have specific function were extracted through bioinformatics genome mining of pathway enzyme candidates.

[0034] The present invention comprises an exogenous gene encoding AADH. In an embodiment, the gene encoding AADH is a nucleic acid encoding AADH having an amino acid sequence of at least 60%, preferably at least 70%, 80%, 90%, 91%, 92%, 93%, 94%, 95%, 96%, 97%, 99% or 100% sequence identity to a AADH amino acid sequence selected from the group consisting of amino acid sequences represented in Tables 1-3 below, but not limited thereto as long as having function of biosynthesizing acetyl-CoA from acetaldehyde.

TABLE 1
AADH (adhE type)

| | GenBank | | | |
|---|---|---|---|---|
| | Accession No. | | | |
| | (Amino Acid | | | |
| Gene | Sequences) | GI No. | Organism | Abbreviation |
| adhE | NP_415757.1 | 16129202 | Escherichia coli K-12 substr. | ADHEec |
| | | | MG1655 | |
| adhE | AY282576.1 | 33578054 | Piromyces sp. E2 | ADHEpm |
| adhE | NP_370672.1 | 15923138 | Staphylococcus aureus subsp. | ADHEsa |
| | | | aureus Mu50 | |
| P343_14875 | EST10864.1 | 558501608 | Sporolactobacillus laevolacticus | ADHEsl |
| | | | DSM 442 | |
| UCRPA7_2908 | EOO01596.1 | 500258690 | Togninia minima UCRPA7 | ADHEtm |
| | WP_020582522 | 522071313 | Endozoicomonas elysicola | ADHEee |
| RW1_006_00090 | GAF43117.1 | 589262551 | Rhodococcus wratislaviensis | ADHErw |
| | | | NBRC 100605 | |

TABLE 2
AADH (eutE type)

| | GenBank | | | |
|---|---|---|---|---|
| | Accession No. | | | |
| | (Amino Acid | | | |
| Gene | Sequences) | GI No. | Organism | Abbreviation |
| eutE | YP_001459232.1 | 157161914 | Escherichia coli HS | EUTEec |
| | YP_003003316.1 | 251788595 | Dickeya zeae Ech1591 | EUTEdz |
| | NP_470466.1 | 16800198 | Listeria innocua Clip11262 | LIN1129li |
| C790_00285 | EMP53767.1 | 468911480 | Morganella morganii SC01 | AADHmm |
| C666_02610 | ENO90114.1 | 479302014 | Thauera linaloolentis DSM | AADHtl |
| | | | 12138 | |
| | WP_018205006.1 | 516997301 | Atribacteria bacterium SCGC | AADHab |
| | | | AAA252-M02 | |
| Maqu_1235 | ABM18325.1 | 120324010 | Marinobacter aquaeolei VT8 | AADHma1 |
| CLS_23700 | CBK77783.1 | 295091676 | Clostridium cf. | AADHcs |
| | | | saccharolyticum K10 | |
| Plabr_4078 | ADY61655.1 | 324970877 | Planctomyces brasiliensis | AADHpb |
| | | | DSM 5305 | |
| GCWU000342_00651 | EEP29295.1 | 229793181 | Shuttleworthia satelles | AADHss |
| | | | DSM 14600 | |
| Tola_1697 | ACQ93307.1 | 237500714 | Tolumonas auensis DSM 9187 | AADHta |
| HMPREF9024_01049 | EFA26759.1 | 270280925 | Pediococcus acidilactici 7_4 | AADHpa |
| BN552_01640 | CDB76812.1 | 524431109 | Blautia sp. CAG: 237 | AADHbs |
| HMPREF0179_00640 | EFV45545.1 | 316924378 | Bilophila wadsworthia 3_1_6 | AADHbw |
| Mahau_0819 | AEE96017.1 | 332699076 | Mahella australiensis 50-1 BON | AADHma2 |
| ALO_06783 | EGO64744.1 | 337276312 | Acetonema longum DSM 6540 | AADHal |
| HMPREF9200_0641 | EGS34769.1 | 341591638 | Veillonella sp. oral taxon | AADHvso |
| | | | 780 str. F0422 | |
| VEJY3_08440 | AEX22176.1 | 369841032 | Vibrio sp. EJY3 | AADHvs |
| OpiT1DRAFT_04559 | EIQ00023.1 | 391221602 | Opitutaceae bacterium TAV1 | AADHob |
| HSACCH_00271 | CCU77919.1 | 460789193 | Halanaerobium saccharolyticum | AADHhs |
| | | | DSM 6643 | |
| Hoch_5813 | ACY18289.1 | 262082320 | Haliangium ochraceum DSM | AADHho |
| | | | 14365 | |

TABLE 3
AADH

| | GenBank | | | |
|---|---|---|---|---|
| | Accession No. | | | |
| | (Amino Acid | | | |
| Gene | Sequences) | GI No. | Organism | Abbreviation |
| sucD | EEN82978.1 | 229317069 | Porphyromonas endodontalis | AADHpe |
| | | | ATCC 35406 | |
| AZOBR_p480045 | CCD03730.1 | 356882712 | Azospirillum brasilense Sp245 | AADHabr |
| HMPREF1987_01259 | ERJ82808.1 | 543978929 | Peptostreptococcaceae bacterium | AADHpba |
| | | | 113 str. W5053 | |
| Terro_0974 | AFL87295.1 | 390411791 | Terriglobus roseus DSM 18391 | AADHtr |

[0035] The present invention comprises an gene encoding ACC. In an embodiment, the gene encoding ACC is a nucleic acid encoding ACC having an amino acid sequence of at least 60%, preferably at least 70%, 80%, 90%, 91%, 92%, 93%, 94%, 95%, 96%, 97%, 99% or 100% sequence identity to a ACC amino acid sequence selected from the group consisting of amino acid sequences represented in Table 4 below, but not limited thereto as long as having function of biosynthesizing malonyl-CoA from acetyl-CoA.

TABLE 4
ACC (eukaryotic multidomain type)

| | GenBank | | | |
|---|---|---|---|---|
| | Accession No. | | | |
| | (Amino Acid | | | |
| Gene | Sequences) | GI No. | Organism | Abbreviation |
| ACC1 | CAA962941 | 1302498 | Saccharomyces cerevisiae | ACC1sc |
| | | | S288c | |
| YALI0C11407g | XP_501721.1 | 50548503 | Yarrowia lipolytica CLIB122 | ACC1yl |
| HMPREF1544_10598 | EPB82652.1 | 511001160 | Mucor circinelloidesf. | ACC1mc |
| | | | circinelloides 1006PhL | |
| ACC1ke | | | Kazachstania exigua | ACC1ke |
| ACC1ch | | | Candida humilis | ACC1ch |
| CGB_F3610C | XP_003194770.1 | 321260100 | Cryptococcus gattii WM276 | ACC1cg |
| AGABI1DRAFT_70405 | EKM81867.1 | 409081508 | Agaricus bisporus var. | ACC1ab |
| | | | burnettii JB137-S8 | |
| BATDEDRAFT_18673 | EGF84402.1 | 328774365 | Batrachochytrium dendrobatidis | ACC1bd |
| | | | JAM81 | |
| RHTO_02004 | EMS21133.1 | 472583500 | Rhodosporidium toruloides | ACC1rt |
| | | | NP11 | |
| PITG_18706 | EEY68805.1 | 262110753 | Phytophthora infestans T30-4 | ACC1pi |
| TCM_034957 | XP_007018852.1 | 590598290 | Theobroma cacao | ACC1tc |
| Ot01g03240 | CAL50235.1 | 116000555 | Ostreococcus tauri | ACC1ot |
| NGATSA_3002800 | AFJ69228.1 | 387219039 | Nannochloropsis gaditana | ACC1ng |
| | | | CCMP526 | |
| accA | EAL63219.1 | 60465120 | Dictyostelium discoideum AX4 | ACC1dd |
| LOC101893358 | XP_005182000.1 | 557764587 | Musca domestica | ACC1md |
| ACACA | ABX09993.1 | 159895418 | Sus scrofa | ACC1ss |
| | Uniprot: H2YM65 | | Ciona savignyi | ACC1cs |

[0036] The present invention comprises a gene encoding MCR. In an embodiment, an MCR could be bi-functional in that it has a function of converting malonyl-CoA to malonate semialdehyde and a function of converting malonate semialdehyde to 3-HP; or mono-functional in that it has a function of converting malonyl-CoA to malonate semialdehyde.

[0037] In the present invention, gene encoding said bi-functional is a nucleic acid encoding MCR having an amino acid sequence of at least 60%, preferably at least 70%, 80%, 90%, 91%, 92%, 93%, 94%, 95%, 96%, 97%, 99% or 100% sequence identity to a MCR amino acid sequence selected from the group consisting of amino acid sequences represented in Table 5 below, but not limited thereto as long as simultaneously having the function of converting malonyl-CoA to malonate semialdehyde and the function of converting malonate semialdehyde to 3-HP.

TABLE 5
MCR (bifunctional type)

| | GenBank | | | |
|---|---|---|---|---|
| | Accession No. | | | |
| | (Amino Acid | | | |
| Gene | Sequences) | GI No. | Organism | Abbreviation |
| mcr | AAS20429.1 | 42561982 | Chloroflexus aurantiacus | MCRca |
| Cagg_1256 | ACL24164.1 | 219542426 | Chloroflexus aggregans | MCRcag |
| | | | DSM 9485 | |
| OSCT_0547 | EFO81531.1 | 308227877 | Oscillochloris trichoides | MCRot |
| | | | DG-6 | |
| Rcas_2929 | ABU58991.1 | 156234208 | Roseiflexus castenholzii | MCRrc |
| | | | DSM 13941 | |
| OMB55_00007690 | EHQ57048.1 | 374302864 | gamma proteobacterium | MCRgp |
| | | | HIMB55 | |
| Cabther_B0159 | AEP13163.1 | 347588634 | Chloracidobacterium | MCRct |
| | | | thermophilum B | |
| | WP_022680613.1 | 550932202 | Sandarakinorhabdus | MCRsl |
| | | | limnophila | |
| | WP_023839102.1 | 564013708 | Blastomonas sp. | MCRbs |
| | | | CACIA14H2 | |

[0038] In another embodiment, said MCR gene could be mono-functional having function of converting malonyl-CoA to malonate semialdehyde, a gene encoding an enzyme which can convert malonate semialdehyde to 3-HP could be further comprised.

[0039] In the present invention, said gene encoding mono-functional MCR is a nucleic acid encoding MCR having an amino acid sequence of at least 60%, preferably at least 70%, 80%, 90%, 91%, 92%, 93%, 94%, 95%, 96%, 97%, 99% or 100% sequence identity to a MCR amino acid sequences selected from the group consisting of amino acid sequences represented in Table 6 below, but not limited thereto as long as having function of converting malonyl-CoA to malonate semialdehyde.

TABLE 6
MCR

| | GenBank | | | |
|---|---|---|---|---|
| | Accession No. | | | |
| | (Amino Acid | | | |
| Gene | Sequences) | GI No. | Organism | Abbreviation |
| Msed_0709 | ABP94884.1 | 145701742 | Metallosphaera sedula DSM | MCRms |
| | | | 5348 | |
| mcr/scr | BAB67276.1 | 15623288 | Sulfolobus tokodaii DSM | MCRst |
| | | | 16993 | |
| | WP_020198954.1 | 519043079 | Sulfolobales archaeon Acd1 | MCRsa1 |
| SacRon12I_11780 | AGE74568.1 | 449039143 | Sulfolobus acidocaldarius | MCRsa2 |
| | | | Ron12/I | |
| SacRon12I 10705 | AGE74357.1 | 449038932 | Sulfolobus acidocaldarius | MCRsa3 |
| | | | Ron12/I | |
| | BAJ50751.1 | 343485097 | Candidatus Caldiarchaeum | MCRcc |
| | | | subterraneum | |
| MetMK1_00028480 | EHP68415.1 | 373523495 | Metallosphaera | MCRmy |
| | | | yellowstonensis MK1 | |
| TREAZ_1307 | AEF80380.1 | 333734431 | Treponema azotonutricium | MCRta |
| | | | ZAS-9 | |

[0040] In the present invention, said gene encoding enzyme which can convert malonate semialdehyde to 3-HP is a nucleic acid encoding an enzyme having an amino acid sequence of at least 60%, preferably at least 70%, 80%, 90%, 91%, 92%, 93%, 94%, 95%, 96%, 97%, 99% or 100% sequence identity to a HPDH, HIBADH, HBDH or BDH amino acid sequence selected from the group consisting of amino acid sequences represented in Tables 7-10 below, but not limited thereto as long as the protein encoding gene has the function of biosynthesizing 3-HP from malonate semialdehyde.

[0041] HPDH amino acid sequences represented in Table 7 below, HIBADH amino acid sequences represented in Table 8 below, HBDH amino acid sequences represented in Table 9 below, and BDH-amino acid sequences represented in Table 10 below are amino acid sequences of protein that function of biosynthesizing 3-HP from malonate semialdehyde.

TABLE 7
HPDH

| | GenBank | | | |
|---|---|---|---|---|
| | Accession No. | | | |
| | (Amino Acid | | | |
| Gene | Sequences) | GI No. | Organism | Abbreviation |
| EC3431_0375 | EFV00080.1 | 315619553 | Escherichia coli 3431 | HPDHec |
| YMR226C | DAA10125.1 | 283814130 | Saccharomyces cerevisiae S288c | HPDHsc |
| Msed_1993 | ABP96133.1 | 145702991 | Metallosphaera sedula DSM 5348 | HPDHms |
| STK_15070 | BAK54608.1 | 342306519 | Sulfolobus tokodaii str. 7 | HPDHst |
| BWG_0862 | ACR64730.1 | 238862732 | Escherichia coli BW2952 | HPDHecb |
| ATEG_09041 | XP_001217663.1 | 115436862 | Aspergillus terreus NIH2624 | HPDHat |
| | YP_902607.1 | 118581357 | Pelobacter propionicus DSM 2379 | HPDHpp |
| Snov_0928 | YP_003692871.1 | 298290932 | Starkeya novella DSM 506 | HPDHsn |
| | YP_004145243.1 | 319785768 | Pseudoxanthomonas suwonensis | HPDHps |
| | | | 11-1 | |
| | WP_002641751.1 | 488717875 | Simonsiella muelleri | HPDHsm |
| | WP_006802623.1 | 493855747 | Helicobacter winghamensis | HPDHhw |
| | WP_007116408.1 | 494180330 | Enhydrobacter aerosaccus | HPDHea |
| | WP_018365922.1 | 517177104 | Streptococcus didelphis | HPDHsd |
| | WP_019460509.1 | 518290301 | Roseomonas sp. B5 | HPDHrs |
| YDF1 | EAZ63492.1 | 126213385 | Pichia stipitis CBS 6054 | HPDHpst |
| KAFR0B03360 | CCF56633.1 | 372462351 | Kazachstania africana CBS 2517 | HPDHka |
| ydfG | EGC72291.1 | 325160162 | Haemophilus parainfluenzae ATCC | HPDHhp |
| | | | 33392 | |
| K788_004913 | ETY79751.1 | 575860535 | Burkholderia caribensis MBA4 | HPDHbc |
| AMED_69 | ADJ48621.1 | 299798246 | Amycolatopsis mediterranei U32 | HPDHam |
| CFU_3402 | AEK63226.1 | 340553851 | Collimonas fungivorans Ter331 | HPDHcf |
| Rahaq2_2300 | AEX52155.1 | 371588425 | Rahnella aquatilis ATCC 33071 | HPDHra |
| LS215_1598 | ACP35603.1 | 227456916 | Sulfolobus islandicus L.S.2.15 | HPDHsi |
| | WP_003467297.1 | 489562770 | Xanthomonas translucens | HPDHxt |
| | WP_007747336.1 | 495021561 | Cronobacter dublinensis | HPDHcd |
| | WP_021506918.1 | 545151592 | Pantoea dispersa | HPDHpd |
| | EHT00469.1 | 376387763 | Klebsiella oxytoca 10-5245 | HPDHko |
| | ESM32057.1 | 555088912 | Enterobacter cloacae BWH 31 | HPDHecl |

TABLE 8
HIBADH

| | GenBank | | | |
|---|---|---|---|---|
| | Accession No. | | | |
| | (Amino Acid | | | |
| Gene | Sequences) | GI No. | Organism | Abbreviation |
| mmsB | ADR61938.1 | 313500572 | Pseudomonas putida BIRD-1 | HIBADHpp |
| PA3569 | AAG06957.1 | 9949723 | Pseudomonas aeruginosa PAO1 | HIBADHpa |
| BC_4042 | AAP10961.1 | 29897686 | Bacillus cereus ATCC 14579 | HIBADHbc |
| QWA_01835 | EJC65559.1 | 393165510 | Alcaligenes faecalis NCIB 8687 | HIBADHaf |
| | JI420577.1 | 327223309 | Lytechinus variegatus | HIBADHlv |
| | GAXL01007172.1 | 596424618 | Chyphotes mellipes | HIBADHcm |
| POPTR_0001s46990g | XP_002300566.1 | 224061611 | Populus trichocarpa | HIBADHpt |
| | WP_007234036.1 | 494440757 | marine gamma proteobacterium | HIBADHmgp |
| | | | HTCC2080 | |
| | WP_009244364.1 | 496538096 | Clostridiales sp. | HIBADHcs |
| | WP_017931623.1 | 516543998 | Robiginitomaculum antarcticum | HIBADHra |
| | WP_018914915.1 | 517744707 | Thiomonas sp. FB-6 | HIBADHts |
| | WP_022530055.1 | 548582704 | Lactobacillus shenzhenensis | HIBADHls |
| ABAZ39_23055 | EZQ03930.1 | 612167293 | Azospirillum brasilense | HIBADHab |
| | EMI09340.1 | 460132162 | Anoxybacillus sp. DT3-1 | HIBADHas |
| T458_21320 | EST53365.1 | 558617142 | Brevibacillus panacihumi W25 | HIBADHbp |
| xcc-b100_3039 | CAP52402.1 | 167734194 | Xanthomonas campestris pv. | HIBADHxc |
| | | | campestris | |
| Bcenmc03 3479 | ACA92632.1 | 169818050 | Burkholderia cenocepacia MC0-3 | HIBADHbcm |
| Hoch_3369 | ACY15871.1 | 262079902 | Haliangium ochraceum DSM 14365 | HIBADHho |
| mmsB | ADP96674.1 | 311693801 | Marinobacter adhaerens HP15 | HIBADHma |
| ivdF | AAN54737.1 | 24347484 | Shewanella oneidensis MR-1 | HIBADHso |

TABLE 9
HBDH

| | GenBank | | | |
|---|---|---|---|---|
| | Accession No. | | | |
| | (Amino Acid | | | |
| Gene | Sequences) | GI No. | Organism | Abbreviation |
| gbd | AAC41425.1 | 695279 | Cupriavidus necator | HBDHcn |
| 4hbD | EDK35022.1 | 146348486 | Clostridium kluyveri DSM 555 | HBDHck |
| GOS_1589287 | EDB80735.1 | 142959799 | marine metagenome sp. | HBDHmm |
| HMPREF0080_00276 | EHM43401.1 | 364565684 | Anaeroglobus geminatus F0357 | HBDHag |
| BN605_01179 | CDD07748.1 | 524585315 | Dorea sp. CAG: 317 | HBDHds |
| BN791_01127 | CDE92329.1 | 524795667 | Fusobacterium sp. CAG: 815 | HBDHfs |
| Odosp_2059 | ADY33063.1 | 324312510 | Odoribacter splanchnicus | HBDHos |
| | | | DSM 220712 | |
| Bpro_2526 | ABE44443.1 | 91697614 | Polaromonas sp. JS666 | HBDHps |
| Csal_1756 | ABE59108.1 | 91796969 | Chromohalobacter salexigens | HBDHcs |
| | | | DSM 3043 | |
| BRPE64_DCDS02300 | BAN27166.1 | 506947049 | Burkholderia sp. RPE64 | HBDHbs |

TABLE 10
BDH

| | GenBank | | | |
|---|---|---|---|---|
| | Accession No. | | | |
| | (Amino Acid | | | |
| Gene | Sequences) | GI No. | Organism | Abbreviation |
| bdhA | GAA17557.1 | 346057674 | Pseudomonas aeruginosa | BDHpa |
| | | | NCMG1179 | |
| Bresu_2563 | YP_003819493.1 | 302383670 | Brevundimonas subvibrioides | BDHbs |
| | | | ATCC 15264 | |
| | YP_004110707.1 | 316935725 | Rhodopseudomonas palustris | BDHrp |
| | | | DX-1 | |
| | WP_008960707.1 | 496247322 | Bradyrhizobium sp. STM 3809 | BDHbss |
| | WP_009158463.1 | 496449618 | Thalassobium sp. R2A62 | BDHts |
| | WP_010548788.1 | 498234632 | gamma proteobacterium HIMB30 | BDHgp |
| | WP_018183273.1 | 516955964 | Kaistia granuli | BDHkg |
| h16_A1334 | CAJ92474.1 | 113526129 | Ralstonia eutropha H16 | BDHre |
| bdhA | EOY63580.1 | 509564889 | Klebsiella pneumoniae KP-7 | BDHkp |
| AZOBR_p140023 | CCD00057.1 | 356879155 | Azospirillum brasilense Sp245 | BDHab |
| bdhA | ABF07432.1 | 93353343 | Cupriavidus metallidurans CH34 | BDHcm |

[0042] In a specific embodiment of the present invention, the recombinant yeast comprising an active 3-HP biosynthetic pathway could have genes listed in Table 11, such as an exogenous gene encoding AADH having an amino acid sequence selected from the group consisting of SEQ ID NOs: 74 to 98, an endo- or exo-genous gene encoding ACC having an amino acid sequence selected from the group consisting of SEQ ID NOs: 99 to 106, an exogenous gene encoding MCR having an amino acid sequence selected from the group consisting of SEQ ID NOs: 107 to 116, and an exogenous gene encoding HPDH having an amino acid sequence selected from the group consisting of SEQ ID NOs: 117 to 144.

TABLE 11

| Type | Gene Abbreviation | SEQ ID NOs. |
|---|---|---|
| AADHs | AADHab | SEQ ID NO: 74 |
| | AADHal | SEQ ID NO: 75 |
| | AADHbs | SEQ ID NO: 76 |
| | AADHbw | SEQ ID NO: 77 |
| | AADHcs | SEQ ID NO: 78 |
| | AADHho | SEQ ID NO: 79 |
| | AADHhs | SEQ ID NO: 80 |
| | AADHma1 | SEQ ID NO: 81 |
| | AADHma2 | SEQ ID NO: 82 |
| | AADHmm | SEQ ID NO: 83 |
| | AADHpa | SEQ ID NO: 84 |
| | AADHpb | SEQ ID NO: 85 |
| | AADHpe | SEQ ID NO: 86 |
| | AADHrw | SEQ ID NO: 87 |
| | AADHsl | SEQ ID NO: 88 |
| | AADHss | SEQ ID NO: 89 |
| | AADHta | SEQ ID NO: 90 |
| | AADHtl | SEQ ID NO: 91 |
| | AADHtm | SEQ ID NO: 92 |
| | AADHvs | SEQ ID NO: 93 |
| | ADHEec | SEQ ID NO: 94 |
| | AHEpm | SEQ ID NO: 95 |
| | EUTEdz | SEQ ID NO: 96 |
| | EUTEec | SEQ ID NO: 97 |
| | LIN1129li | SEQ ID NO: 98 |
| ACC1s | ACC1sc_S659A | SEQ ID NO: 99 |
| | ACC1sc_S659A/S1157A | SEQ ID NO: 100 |
| | ACC1sc_S1157A | SEQ ID NO: 101 |
| | ACC1ke | SEQ ID NO: 102 |
| | ACC1mc | SEQ ID NO: 103 |
| | ACC1sc | SEQ ID NO: 104 |
| | ACCyl | SEQ ID NO: 105 |
| | ACC1ch | SEQ ID NO: 106 |
| bifunctional | HPDH-MCRbs | SEQ ID NO: 107 |
| HPDH-MCRs | HPDH-MCRca | SEQ ID NO: 108 |
| | HPDH-MCRcag | SEQ ID NO: 109 |
| | HPDH-MCRct | SEQ ID NO: 110 |
| | HPDH-MCRgb | SEQ ID NO: 111 |
| | HPDH-MCRot | SEQ ID NO: 112 |
| | HPDH-MCRrc | SEQ ID NO: 113 |
| | HPDH-MCRsl | SEQ ID NO: 114 |
| | HPDH-MCRca_variant_3 | SEQ ID NO: 115 |
| | HPDH-MCRca_variant_6 | SEQ ID NO: 116 |
| HPDHs | BDHcm | SEQ ID NO: 117 |
| | BDHkp | SEQ ID NO: 118 |
| | HBDHos | SEQ ID NO: 119 |
| | HBDHps | SEQ ID NO: 120 |
| | HIBADHas | SEQ ID NO: 121 |
| | HIBADHbc | SEQ ID NO: 122 |
| | HIBADHma | SEQ ID NO: 123 |
| | HIBADHpa | SEQ ID NO: 124 |
| | HIBADHxc | SEQ ID NO: 125 |
| | HPDHam | SEQ ID NO: 126 |
| | HPDHbs | SEQ ID NO: 127 |
| | HPDHca | SEQ ID NO: 128 |
| | HPDHcag | SEQ ID NO: 129 |
| | HPDHct | SEQ ID NO: 130 |
| | HPDHec | SEQ ID NO: 131 |
| | HPDHed | SEQ ID NO: 132 |
| | HPDHgb | SEQ ID NO: 133 |
| | HPDHhw | SEQ ID NO: 134 |
| | HPDHka | SEQ ID NO: 135 |
| | HPDHms | SEQ ID NO: 136 |
| | HPDHot | SEQ ID NO: 137 |
| | HPDHps | SEQ ID NO: 138 |
| | HPDHra | SEQ ID NO: 139 |
| | HPDHrc | SEQ ID NO: 140 |
| | HPDHsi | SEQ ID NO: 141 |
| | HPDHsl | SEQ ID NO: 142 |
| | HPDHsm | SEQ ID NO: 143 |
| | HPDHst | SEQ ID NO: 144 |

[0043] In the present invention, the yeast could be acid-resistant, and said acid-resistant yeast could be selected from the group consisting of for example the genera Saccharomyces, Kazachstania and Candida. Yeast species of particular interest include Saccharomyces cerevisiae, Kazachstania exigua, Kazachstania bulderi, and Candida humilis, but is not limited thereto.

[0044] According to the present invention, the recombinant yeast might be acid-resistant, and in order to prepare acid-resistant recombinant yeast, it is preferable to use yeast host having acid-resistant against organic acid (especially 3-HP and/or organic acid produced as a side product when preparing 3-HP).

[0045] The acid-resistant yeast might be selected from the group consisting of Saccharomyces cerevisiae, Kazachstania exigua, Kazachstania bulderi and Candida humilis, but not limited thereto.

[0046] The term “acid-resistant yeast” used in the specification refers to yeast having acid-resistant against organic acids such as 3-HP or the like, and acid-resistance could be evaluated by confirming the growth on medium containing various concentrations of organic acid. In this case, “acid-resistant yeast” might be yeast showing high growth rate and rate of consuming biomass when grown in medium containing high concentration of organic acid, compared to general yeast.

[0047] Acid-resistant yeast, according to the present invention, might be yeast that could maintain at least 10% of rate of consuming glucose (or the like) or at least 10% of specific growth rate in the medium containing more than 1M or more organic acid (particularly 3-HP) under pH less than pKa value of organic acid (particularly 3-HP), compared to yeast grown in the medium not containing organic acid. Acid-resistant yeast, according to the present invention, might be yeast that could maintain at least 10% of rate of consuming glucose (or the like) or at least 10% of specific growth rate under pH 2-4, compared to pH 7.

[0048] The genetically modified microorganism according to the present invention could be prepared by inserting a gene to a chromosome of a microorganism or introducing a modified vector into a microorganism.

[0049] A host where introduction efficiency of DNA is high and expression efficiency of introduced DNA is high is commonly used as said modified microorganism, and in one exemplary embodiment of the present invention, yeast is used, but is not limited thereto, any kind of microorganism could be used as long as sufficiently expressing targeted DNA.

[0050] Said modified microorganism could be prepared by any transformation method. “Transformation” means introducing DNA into a host; thereby DNA is able to be replicated, as a factor of chromosome or by integrating chromosome, which is a phenomenon artificially causing a genetic change. In common transformation methods, there are electroporation, acetic acid lithium-PEG method, and the like.

[0051] In addition, in the present invention, any generally well-known genetic engineering method could be used as a method for introducing a gene into a chromosome of a host microbe, and as an example, there is a method which uses retrovirus vector, adenovirus vector, adeno-associated virus vector, herpes simplex virus vector, poxvirus vector, lentivirus vector, non-viral vector, etc. “Vector” means a DNA construct comprising a DNA sequence to be operably linked to a suitable control sequence that can express DNA inside a host. A vector may be a plasmid, a phage particle, or simply a latent genomic insert. When a vector is transformed into a suitable host, it may be replicated or functional regardless of a host genome, or in some cases, it may be integrated into a genome itself. A plasmid is the type that is most generally used as a vector.

[0052] A typical plasmid vector that can be used for the object has a structure comprising (a) a replication origin that allows a replication to be effectively performed to include plasmid vectors per host cell, (b) an antibiotic-resistance gene or an auxotrophic marker gene that allows a host cell transformed with a plasmid vector to be selected, and (c) a restriction site of restriction enzyme that can be inserted with a foreign DNA fragment. Even if there is no suitable restriction site of a restriction enzyme, a vector and foreign DNA may be easily ligated when using the linker or the synthetic oligonucleotide adaptor according to a general method.

[0053] Nucleic acid is “operably linked” when it is arranged with a functional relationship with other nucleic acid sequences. It may be a gene and control sequence(s) that is linked in a process that enables the gene expression when a proper molecule (for example, transcriptional activation protein) is linked to the control sequence(s). For example, DNA for a pre-sequence or a secretion leader is operably linked to DNA for a polypeptide when expressing a pre-protein participating in secretion of a polypeptide; a promoter or an enhancer is operably linked to a coding sequence when affecting transcription of a sequence; a ribosome binding domain is operably linked to a coding sequence when affecting transcription of a sequence; or a ribosome binding domain is operably linked to a coding sequence when it is arranged to be easily translated.

[0054] Generally, “operably linked” refers to a contact of a linked DNA sequence, or that the secretion leader is contacted and presented in the leading frame. However, the enhancer is not required to contact. Linkage of enhancer sequence is performed by ligation at a convenient restriction enzyme site. When the domain is not presented, a synthetic oligonucleotide adaptor or linker according to a general method is used.

[0055] Of course, it should be understood that all the vectors do not function equally to express the DNA sequences according to the present invention. Likewise, all the host cells do not function equally for the same expression system. However, those skilled in the art may properly select a vector, expression control sequence and host cell without departing from the scope of the present invention and without undue experimentation. For example, in selection of a vector, a host cell must be considered. This is because the vector should be replicated therein. Also, the replication number and the ability to control the replication number of a vector and expression of other proteins encoded by the vector, for example, antibiotic marker, should be considered.

[0056] In another aspect, the present invention is directed to a method of preparing 3-HP comprising: (a) culturing the recombinant yeast of any one of claims 1 to 10 in a medium including at least one carbon source, thereby producing 3-HP; and (b) isolating the 3-HP from the culture.

[0057] In the present invention, the carbon source could be one or more selected from the group consisting of glucose, xylose, arabinose, sucrose, fructose, cellulose, glucose oligomers and glycerol, but is not limited thereto.

[0058] In the present invention, culturing is performed preferably under a condition that microbes such as E. coli does not work (e.g. producing metabolite etc.) anymore. In an embodiment, culturing is performed at pH 1.0 to 6.5, preferably at pH 1.0 to 6.0, more preferably at pH 2.6 to 4.0, but is not limited thereto.

### MODE FOR THE INVENTION

[0059] Hereinafter, the present invention will be described in more detail with reference to the following Examples. However, the following Examples are provided by way of example so as to easily explain description and scope of the technical spirit of the present invention. Accordingly, the scope of the present invention is not restricted thereby or changed therefrom. In addition, various modifications and changes may be made by those skilled in the art to which the present invention pertains from this description.

### Example 1: Selection of Host Yeast Strains Based on Tolerance to 3-HP

[0060] An essential feature of a 3-HP production organism is good tolerance to high concentrations of 3-HP, which enables product accumulation during fermentation with minimal loss of strain performance. A large, diverse set of 718 wild-type yeast strains were screened to identify those strains that can tolerate high concentrations of 3-HP at low pH and that can grow and metabolize glucose under these conditions (Table 12).

[0061] A number of agar plate and liquid medium microtitre plate based growth assays were initially used to screen the entire set of strains for acid tolerance. Afterwards, a subset of strains were evaluated for their ability to tolerate high amounts of 3-HP at low pH in shake flask cultivations. In isolation, none of these screening approaches is a perfect indicator of 3-HP tolerance in an industrial setting, but a combination of numerous approaches provides a thorough and robust means of establishing promising 3-HP producing yeast strains.

[0062] Initially, the growth of the 718 yeast strains was evaluated on solid YPD-based agar medium containing varying amounts of 3-HP: 0 g/L 3-HP (pH 6.62), 50 g/L 3-HP (pH 3.44), 75 g/L 3-HP (pH 3.28), 100 g/L 3-HP (pH 3.17) and 125 g/L 3-HP (pH 3.08). The strains were then scored based on their ability to tolerate the varying amounts of 3-HP in this screening assay.

[0063] Growth of the 718 yeast strains was then evaluated in the absence (SCD-based medium, 0 g/L 3-HP, pH 6.0) or presence (SCD-based medium, 70 g/L 3-HP, pH 3.5) of 3-HP in microtitre plate liquid cultures using Bioscreen C machines which can automatically incubate, shake and measure the turbidity of the cultures. Existing software for modeling microbial growth curves was then adapted to establish the lag phase, maximal growth rate and final cell density for each strain at each of the experimental conditions. For this screening assay, each strain was scored based on its maximum growth rate in the absence of 3-HP, its maximum growth rate in the presence of 3-HP and the relative difference between these two maximum growth rate values.

[0064] Using a liquid handling robot, the growth and glucose utilization rates of the 718 yeast strains were evaluated in YPD-based liquid medium containing 85 g/L 3-HP (pH 3.5) in microtitre plates. An automated work-flow was used to inoculate growth plates, to dilute samples for OD measurement at designated time-points and to centrifuge and collect supernatants for HPLC analysis which was used to measure the residual glucose amounts at designated time-points. In contrast to the Bioscreen C growth assays, the robotic microtitre plate growth assay allowed for more aeration and higher maximum cell densities to be achieved while also allowing for glucose utilization rates to be evaluated instead of just evaluating growth rate like the previous two assays. For this screening assay, each strain was scored based on their maximum cell density obtained in the presence of 3-HP and their ability to consume glucose in the presence of 3-HP at low pH.

[0065] The individual scores from the various evaluative 3-HP tolerance assays were averaged together to obtain the final 3-HP tolerance score for each of the strains (Table 12). These screens indicated that the yeast species Candida apicola, Candida humilis, Issatchenkia orientalis, Kazachstania bulderi, Kazachstania exigua, Pichia membranifaciens, Saccharomyces cerevisiae and Yarrowia lipolytica had good general tolerance to 3-HP at low pH under varying conditions.

[0066] These eight 3-HP tolerant yeast species were then further analyzed for their tolerance to 3-HP at low pH in shake flask cultivations. For these cultivations (defined SCD-based medium, high initial biomass, low aeration), the strain's ability to grow, consume glucose and produce ethanol was evaluated in the presence of varying levels of 3-HP at varying pHs: 100 g/L 3-HP (pH 4.0), 100 g/L 3-HP (pH 3.5), 100 g/L 3-HP (pH 3.0) and 80 g/L 3-HP (pH 2.6). These shake flask cultivations revealed that certain C. humilis, K. bulderi, K. exigua and S. cerevisiae yeast strains have very robust tolerance to high levels of 3-HP at low pH as they had the fastest glucose utilization rates, biomass production rates and ethanol production rates amongst the various yeast strains under these harsh conditions. On the other hand, the C. apicola, I. orientalis, P. membranifaciens and Y. lipolytica yeast strains were unable to perform well under these very restrictive growth conditions. These detailed follow-up analyses using various shake flask cultivations confirmed that certain C. humilis, K. bulderi, K. exigua and S. cerevisiae yeast strains show great potential as 3-HP production hosts as they exhibit a high natural tolerance to 3-HP under industrially relevant conditions.

TABLE 12
Yeast strain tolerance to 3-HP

| Yeast Strain | Yeast Species | Average Score |
|---|---|---|
| VSK-1 | Saccharomyces pastorianus | 1.54 |
| VSK-2 | Saccharomyces cerevisiae | 1.38 |
| VSK-3 | Saccharomyces cerevisiae | 1.03 |
| VSK-4 | Saccharomyces cerevisiae | 0.83 |
| VSK-5 | Saccharomyces cerevisiae | 1.71 |
| VSK-6 | Saccharomyces pastorianus | 1.57 |
| VSK-7 | Saccharomyces pastorianus | 3.79 |
| VSK-8 | Saccharomyces pastorianus | 0.63 |
| VSK-9 | Saccharomyces pastorianus | 1.58 |
| VSK-10 | Saccharomyces pastorianus | 0.08 |
| VSK-11 | Saccharomyces pastorianus | 1.67 |
| VSK-12 | Saccharomyces pastorianus | 1.65 |
| VSK-13 | Saccharomyces pastorianus | 1.24 |
| VSK-14 | Saccharomyces pastorianus | 1.54 |
| VSK-15 | Saccharomyces pastorianus | 1.04 |
| VSK-16 | Saccharomyces pastorianus | 1.46 |
| VSK-17 | Saccharomyces pastorianus | 1.17 |
| VSK-18 | Saccharomyces pastorianus | 1.17 |
| VSK-19 | Saccharomyces pastorianus | 1.28 |
| VSK-20 | Saccharomyces pastorianus | 1.53 |
| VSK-21 | Saccharomyces pastorianus | 0.67 |
| VSK-22 | Saccharomyces pastorianus | 0.58 |
| VSK-23 | Saccharomyces cerevisiae | 1.67 |
| VSK-24 | Saccharomyces cerevisiae | 2.13 |
| VSK-25 | Saccharomyces pastorianus | 1.97 |
| VSK-26 | Saccharomyces pastorianus | 3.89 |
| VSK-27 | Saccharomyces pastorianus | 1.44 |
| VSK-28 | Saccharomyces pastorianus | 0.61 |
| VSK-29 | Saccharomyces pastorianus | 1.44 |
| VSK-30 | Saccharomyces pastorianus | 1.64 |
| VSK-31 | Saccharomyces pastorianus | 1.25 |
| VSK-32 | Saccharomyces pastorianus | 1.49 |
| VSK-33 | Saccharomyces pastorianus | 1.78 |
| VSK-34 | Saccharomyces pastorianus | 1.36 |
| VSK-35 | Saccharomyces pastorianus | 1.36 |
| VSK-36 | Saccharomyces pastorianus | 1.39 |
| VSK-37 | Saccharomyces pastorianus | 1.47 |
| VSK-38 | Saccharomyces cerevisiae | 3.82 |
| VSK-39 | Saccharomyces pastorianus | 1.22 |
| VSK-40 | Saccharomyces pastorianus | 1.31 |
| VSK-41 | Saccharomyces pastorianus | 3.13 |
| VSK-42 | Saccharomyces pastorianus | 1.44 |
| VSK-43 | Saccharomyces pastorianus | 1.44 |
| VSK-44 | Saccharomyces pastorianus | 1.36 |
| VSK-45 | Saccharomyces pastorianus | 1.28 |
| VSK-46 | Saccharomyces pastorianus | 1.57 |
| VSK-47 | Saccharomyces pastorianus | 1.32 |
| VSK-48 | Saccharomyces pastorianus | 0.44 |
| VSK-49 | Saccharomyces pastorianus | 1.18 |
| VSK-50 | Saccharomyces cerevisiae | 1.61 |
| VSK-51 | Saccharomyces pastorianus | 1.86 |
| VSK-52 | Saccharomyces pastorianus | 0.94 |
| VSK-53 | Saccharomyces pastorianus | 1.11 |
| VSK-54 | Saccharomyces pastorianus | 1.53 |
| VSK-55 | Saccharomyces pastorianus | 1.36 |
| VSK-56 | Saccharomyces pastorianus | 0.63 |
| VSK-57 | Saccharomyces pastorianus | 0.81 |
| VSK-58 | Saccharomyces pastorianus | 0.25 |
| VSK-59 | Saccharomyces pastorianus | 1.44 |
| VSK-60 | Saccharomyces pastorianus | 1.31 |
| VSK-61 | Saccharomyces pastorianus | 1.40 |
| VSK-62 | Saccharomyces pastorianus | 2.43 |
| VSK-63 | Saccharomyces pastorianus | 1.44 |
| VSK-64 | Saccharomyces cerevisiae | 2.42 |
| VSK-65 | Saccharomyces cerevisiae | 2.49 |
| VSK-66 | Saccharomyces pastorianus | 3.42 |
| VSK-67 | Saccharomyces cerevisiae | 2.78 |
| VSK-68 | Saccharomyces pastorianus | 0.86 |
| VSK-69 | Saccharomyces pastorianus | 0.65 |
| VSK-70 | Saccharomyces pastorianus | 2.57 |
| VSK-71 | Saccharomyces pastorianus | 1.58 |
| VSK-72 | Saccharomyces pastorianus | 1.19 |
| VSK-73 | Saccharomyces pastorianus | 1.33 |
| VSK-74 | Saccharomyces cerevisiae | 2.71 |
| VSK-75 | Saccharomyces pastorianus | 1.17 |
| VSK-76 | Saccharomyces pastorianus | 0.83 |
| VSK-77 | Saccharomyces pastorianus | 0.79 |
| VSK-78 | Saccharomyces cerevisiae | 1.46 |
| VSK-79 | Saccharomyces cerevisiae | 1.13 |
| VSK-80 | Saccharomyces cerevisiae | 1.25 |
| VSK-81 | Saccharomyces cerevisiae | 1.97 |
| VSK-82 | Saccharomyces cerevisiae | 1.65 |
| VSK-83 | Saccharomyces cerevisiae | 2.72 |
| VSK-84 | Saccharomyces cerevisiae | 1.74 |
| VSK-85 | Saccharomyces cerevisiae | 2.47 |
| VSK-86 | Saccharomyces cerevisiae | 3.00 |
| VSK-87 | Saccharomyces cerevisiae | 3.40 |
| VSK-88 | Saccharomyces cerevisiae | 2.13 |
| VSK-89 | Saccharomyces pastorianus | 1.25 |
| VSK-90 | Saccharomyces pastorianus | 1.13 |
| VSK-91 | Saccharomyces pastorianus | 2.00 |
| VSK-92 | Saccharomyces pastorianus | 3.01 |
| VSK-93 | Saccharomyces pastorianus | 2.38 |
| VSK-94 | Saccharomyces cerevisiae | 3.11 |
| VSK-95 | Saccharomyces cerevisiae | 3.10 |
| VSK-96 | Saccharomyces cerevisiae | 3.10 |
| VSK-97 | Saccharomyces cerevisiae | 3.26 |
| VSK-98 | Saccharomyces cerevisiae | 3.51 |
| VSK-99 | Saccharomyces cerevisiae | 3.63 |
| VSK-100 | Saccharomyces cerevisiae | 2.64 |
| VSK-101 | Saccharomyces cerevisiae | 2.69 |
| VSK-102 | Saccharomyces cerevisiae | 3.06 |
| VSK-103 | Saccharomyces cerevisiae | 3.01 |
| VSK-104 | Saccharomyces pastorianus | 1.44 |
| VSK-105 | Saccharomyces cerevisiae | 3.06 |
| VSK-106 | Saccharomyces pastorianus | 1.72 |
| VSK-107 | Saccharomyces pastorianus | 1.39 |
| VSK-108 | Saccharomyces pastorianus | 1.44 |
| VSK-109 | Saccharomyces pastorianus | 1.97 |
| VSK-110 | Saccharomyces pastorianus | 1.74 |
| VSK-111 | Saccharomyces pastorianus | 2.72 |
| VSK-112 | Saccharomyces cerevisiae | 3.10 |
| VSK-113 | Saccharomyces cerevisiae | 3.39 |
| VSK-114 | Saccharomyces cerevisiae | 1.42 |
| VSK-115 | Saccharomyces pastorianus | 1.44 |
| VSK-116 | Saccharomyces cerevisiae | 3.51 |
| VSK-117 | Saccharomyces cerevisiae | 3.75 |
| VSK-118 | Saccharomyces bayanus | 3.42 |
| VSK-119 | Saccharomyces cerevisiae | 3.15 |
| VSK-120 | Saccharomyces cerevisiae | 2.32 |
| VSK-121 | Saccharomyces cerevisiae | 3.51 |
| VSK-122 | Saccharomyces cerevisiae | 3.11 |
| VSK-123 | Saccharomyces cerevisiae | 3.49 |
| VSK-124 | Saccharomyces cerevisiae | 2.96 |
| VSK-125 | Saccharomyces cerevisiae | 3.51 |
| VSK-126 | Saccharomyces cerevisiae | 0.97 |
| VSK-127 | Saccharomyces cerevisiae | 2.75 |
| VSK-128 | Saccharomyces cerevisiae | 3.68 |
| VSK-129 | Saccharomyces kudriavzevii | 2.61 |
| VSK-130 | Saccharomyces cerevisiae | 3.01 |
| VSK-131 | Saccharomyces cerevisiae | 3.35 |
| VSK-132 | Saccharomyces cerevisiae | 2.90 |
| VSK-133 | Saccharomyces cerevisiae | 3.07 |
| VSK-134 | Saccharomyces cerevisiae | 3.49 |
| VSK-135 | Saccharomyces cerevisiae | 0.75 |
| VSK-136 | Saccharomyces cerevisiae | 2.36 |
| VSK-137 | Saccharomyces cerevisiae | 2.83 |
| VSK-138 | Saccharomyces bayanus | 1.61 |
| VSK-139 | Saccharomyces cerevisiae | 3.07 |
| VSK-140 | Saccharomyces cerevisiae | 3.35 |
| VSK-141 | Saccharomyces cerevisiae | 2.75 |
| VSK-142 | Saccharomyces cerevisiae | 3.04 |
| VSK-143 | Saccharomyces bayanus | 1.43 |
| VSK-144 | Saccharomyces sp. | 3.11 |
| VSK-145 | Saccharomyces sp. | 3.28 |
| VSK-146 | Saccharomyces sp. | 1.89 |
| VSK-147 | Saccharomyces cerevisiae | 3.25 |
| VSK-148 | Saccharomyces cerevisiae | 3.01 |
| VSK-149 | Saccharomyces bayanus | 3.38 |
| VSK-150 | Saccharomyces cerevisiae | 3.22 |
| VSK-151 | Saccharomyces cerevisiae | 2.75 |
| VSK-152 | Saccharomyces cerevisiae | 3.13 |
| VSK-153 | Saccharomyces cerevisiae | 0.08 |
| VSK-154 | Saccharomyces cerevisiae | 2.46 |
| VSK-155 | Saccharomyces cerevisiae | 3.38 |
| VSK-156 | Saccharomyces cerevisiae | 3.06 |
| VSK-157 | Saccharomyces cerevisiae | 2.00 |
| VSK-158 | Saccharomyces pastorianus | 2.75 |
| VSK-159 | Saccharomyces cerevisiae | 1.10 |
| VSK-160 | Saccharomyces cerevisiae | 1.83 |
| VSK-161 | Saccharomyces bayanus | 3.15 |
| VSK-162 | Saccharomyces cerevisiae | 1.79 |
| VSK-163 | Saccharomyces cerevisiae | 2.47 |
| VSK-164 | Saccharomyces cerevisiae | 2.43 |
| VSK-165 | Saccharomyces bayanus | 1.67 |
| VSK-166 | Saccharomyces cerevisiae | 2.90 |
| VSK-167 | Saccharomyces cerevisiae | 2.86 |
| VSK-168 | Saccharomyces cerevisiae | 2.17 |
| VSK-169 | Saccharomyces cerevisiae | 2.76 |
| VSK-170 | Saccharomyces cerevisiae | 3.46 |
| VSK-171 | Saccharomyces cerevisiae | 3.65 |
| VSK-172 | Saccharomyces cerevisiae | 3.89 |
| VSK-173 | Saccharomyces cerevisiae | 3.11 |
| VSK-174 | Saccharomyces cerevisiae | 3.61 |
| VSK-175 | Saccharomyces cerevisiae | 2.67 |
| VSK-176 | Saccharomyces cerevisiae | 2.67 |
| VSK-177 | Saccharomyces cerevisiae | 1.88 |
| VSK-178 | Saccharomyces cerevisiae | 3.56 |
| VSK-179 | Saccharomyces cerevisiae | 3.82 |
| VSK-180 | Saccharomyces cerevisiae | 2.54 |
| VSK-181 | Saccharomyces cerevisiae | 3.64 |
| VSK-182 | Saccharomyces cerevisiae | 3.07 |
| VSK-183 | Saccharomyces cerevisiae | 3.32 |
| VSK-184 | Saccharomyces cerevisiae | 3.89 |
| VSK-185 | Saccharomyces cerevisiae | 1.96 |
| VSK-186 | Saccharomyces cerevisiae | 3.51 |
| VSK-187 | Saccharomyces cerevisiae | 3.39 |
| VSK-188 | Saccharomyces cerevisiae | 3.07 |
| VSK-189 | Saccharomyces cerevisiae | 3.71 |
| VSK-190 | Saccharomyces cerevisiae | 3.13 |
| VSK-191 | Saccharomyces pastorianus | 2.04 |
| VSK-192 | Saccharomyces cerevisiae | 3.14 |
| VSK-193 | Saccharomyces cerevisiae | 3.99 |
| VSK-194 | Saccharomyces cerevisiae | 3.53 |
| VSK-195 | Saccharomyces cerevisiae | 3.90 |
| VSK-196 | Saccharomyces cerevisiae | 3.46 |
| VSK-197 | Saccharomyces cerevisiae | 2.99 |
| VSK-198 | Saccharomyces cerevisiae | 4.11 |
| VSK-199 | Saccharomyces cerevisiae | 3.93 |
| VSK-200 | Saccharomyces cerevisiae | 3.40 |
| VSK-201 | Saccharomyces cerevisiae | 1.83 |
| VSK-202 | Saccharomyces cerevisiae | 2.96 |
| VSK-203 | Saccharomyces cerevisiae | 2.64 |
| VSK-204 | Saccharomyces cerevisiae | 2.28 |
| VSK-205 | Saccharomyces cerevisiae | 3.42 |
| VSK-206 | Saccharomyces cerevisiae | 3.17 |
| VSK-207 | Saccharomyces cerevisiae | 3.13 |
| VSK-208 | Saccharomyces cerevisiae | 3.69 |
| VSK-209 | Saccharomyces cerevisiae | 3.64 |
| VSK-210 | Issatchenkia orientalis | 3.07 |
| VSK-211 | Issatchenkia orientalis | 2.40 |
| VSK-212 | Issatchenkia orientalis | 2.44 |
| VSK-213 | Issatchenkia orientalis | 2.60 |
| VSK-214 | Issatchenkia orientalis | 2.85 |
| VSK-215 | Issatchenkia orientalis | 2.35 |
| VSK-216 | Issatchenkia orientalis | 3.04 |
| VSK-217 | Zygosaccharomyces kombuchaensis | 0.67 |
| VSK-218 | Candida glabrata | 3.67 |
| VSK-219 | Candida glabrata | 3.38 |
| VSK-220 | Kazachstania exigua | 3.89 |
| VSK-221 | Kazachstania exigua | 3.89 |
| VSK-222 | Issatchenkia orientalis | 2.01 |
| VSK-223 | Issatchenkia orientalis | 3.13 |
| VSK-224 | Issatchenkia orientalis | 2.60 |
| VSK-225 | Kazachstania exigua | 3.26 |
| VSK-226 | Pichia membranifaciens | 3.11 |
| VSK-227 | Pichia membranifaciens | 3.18 |
| VSK-228 | Pichia membranifaciens | 2.76 |
| VSK-229 | Pichia membranifaciens | 3.26 |
| VSK-230 | Pichia membranifaciens | 3.35 |
| VSK-231 | Pichia membranifaciens | 3.13 |
| VSK-232 | Pichia membranifaciens | 3.06 |
| VSK-233 | Pichia membranifaciens | 3.18 |
| VSK-234 | Pichia membranifaciens | 2.56 |
| VSK-235 | Kazachstania exigua | 4.13 |
| VSK-236 | Saccharomycodes ludwigii | 2.94 |
| VSK-237 | Zygosaccharomyces kombuchaensis | 3.18 |
| VSK-238 | Zygosaccharomyces kombuchaensis | 2.96 |
| VSK-239 | Candida glabrata | 3.49 |
| VSK-240 | Candida glabrata | 1.61 |
| VSK-241 | Issatchenkia orientalis | 2.79 |
| VSK-242 | Kazachstania bulderi | 3.38 |
| VSK-243 | Kazachstania bulderi | 3.60 |
| VSK-244 | Candida magnoliae | 3.08 |
| VSK-245 | Issatchenkia orientalis | 1.63 |
| VSK-246 | Kazachstania bulderi | 3.44 |
| VSK-247 | Issatchenkia orientalis | 0.00 |
| VSK-248 | Issatchenkia orientalis | 3.08 |
| VSK-249 | Issatchenkia orientalis | 3.07 |
| VSK-250 | Kazachstania exigua | 3.00 |
| VSK-251 | Candida glabrata | 2.49 |
| VSK-252 | Issatchenkia orientalis | 2.35 |
| VSK-253 | Kazachstania exigua | 2.33 |
| VSK-254 | Saccharomycodes ludwigii | 2.43 |
| VSK-255 | Issatchenkia orientalis | 2.68 |
| VSK-256 | Kazachstania exigua | 3.56 |
| VSK-257 | Kazachstania exigua | 4.00 |
| VSK-258 | Issatchenkia orientalis | 2.24 |
| VSK-259 | Issatchenkia orientalis | 2.79 |
| VSK-260 | Issatchenkia orientalis | 2.53 |
| VSK-261 | Pichia burtonii | 0.42 |
| VSK-262 | Candida boidinii | 1.86 |
| VSK-263 | Pichia kluyveri | 1.56 |
| VSK-264 | Torulaspora delbrueckii | 3.19 |
| VSK-265 | Kazachstania servazzii | 2.40 |
| VSK-266 | Zygosaccharomyces rouxii | 1.15 |
| VSK-267 | Pichia fermentans | 2.00 |
| VSK-268 | Yarrowia lipolytica | 2.86 |
| VSK-269 | Candida boidinii | 2.46 |
| VSK-270 | Candida intermedia | 0.65 |
| VSK-271 | Candida parapsilosis | 1.58 |
| VSK-272 | Yarrowia lipolytica | 2.10 |
| VSK-273 | Candida parapsilosis | 2.24 |
| VSK-274 | Debaryomyces hansenii | 0.25 |
| VSK-275 | Pichia guilliermondii | 2.32 |
| VSK-276 | Kazachstania servazzii | 0.72 |
| VSK-277 | Rhodotorula glutinis | 0.72 |
| VSK-278 | Cryptococcus albidus | 0.74 |
| VSK-279 | Rhodosporidium toruloides | 0.67 |
| VSK-280 | Debaryomyces occidentalis | 1.17 |
| VSK-281 | Rhodotorula mucilaginosa | 1.54 |
| VSK-282 | Candida auringiensis | 1.58 |
| VSK-283 | Candida succiphila | 2.08 |
| VSK-284 | Ambrosiozyma monospora | 0.71 |
| VSK-285 | Candida arabinofermentans | 0.56 |
| VSK-286 | Kluyveromyces marxianus | 2.06 |
| VSK-287 | Lachancea thermotolerans | 2.28 |
| VSK-288 | Cryptococcus albidus | 0.25 |
| VSK-289 | Debaryomyces occidentalis | 1.76 |
| VSK-290 | Rhodotorula mucilaginosa | 2.85 |
| VSK-291 | Rhodotorula glutinis | 0.00 |
| VSK-292 | Zygosaccharomyces lentus | 0.33 |
| VSK-293 | Rhodosporidium toruloides | 0.38 |
| VSK-294 | Cryptococcus albidus | 0.00 |
| VSK-295 | Torulaspora globosa | 2.07 |
| VSK-296 | Candida stellata | 1.36 |
| VSK-297 | Cryptococcus laurentii | 0.53 |
| VSK-298 | Williopsis saturnus | 0.76 |
| VSK-299 | Cystofilobasidium bisporidii | 1.94 |
| VSK-300 | Cryptococcus curvatus | 1.78 |
| VSK-301 | Sporidiobolus salmonicolor | 2.17 |
| VSK-302 | Pichia jadinii | 0.86 |
| VSK-303 | Geotrichum klebahnii | 0.67 |
| VSK-304 | Cryptococcus laurentii | 0.19 |
| VSK-305 | Debaryomyces hansenii | 0.82 |
| VSK-306 | Yarrowia lipolytica | 1.36 |
| VSK-307 | Candida rugosa | 1.97 |
| VSK-308 | Candida pararugosa | 1.68 |
| VSK-309 | Debaryomyces occidentalis | 0.68 |
| VSK-310 | Arxula adeninivorans | 1.38 |
| VSK-311 | Pichia stipitis | 2.17 |
| VSK-312 | Cryptococcus albidus | 2.19 |
| VSK-313 | Candida haemulonii | 2.18 |
| VSK-314 | Debaryomyces hansenii | 0.38 |
| VSK-315 | Pichia angusta | 0.82 |
| VSK-316 | Rhodotorula minuta | 0.40 |
| VSK-317 | Pichia mandshurica | 1.03 |
| VSK-318 | Zygosaccharornyces bailii | 0.94 |
| VSK-319 | Cryptococcus albidosimilis | 0.44 |
| VSK-320 | Cryptococcus wieringae | 0.61 |
| VSK-321 | Filobasidium globisporum | 0.00 |
| VSK-322 | Filobasidium globisporum | 0.03 |
| VSK-323 | Bulleromyces albus | 0.39 |
| VSK-324 | Candida anglica | 0.56 |
| VSK-325 | Candida anglica | 0.65 |
| VSK-326 | Candida fermentati | 2.28 |
| VSK-327 | Candida natalensis | 0.76 |
| VSK-328 | Candida pararugosa | 1.08 |
| VSK-329 | Candida picinguabensis | 0.71 |
| VSK-330 | Candida silvae | 1.07 |
| VSK-331 | Candida solani | 0.63 |
| VSK-332 | Candida cylindracea | 1.22 |
| VSK-333 | Cryptococcus curvatus | 0.47 |
| VSK-334 | Cryptococcus macerans | 0.58 |
| VSK-335 | Cryptococcus macerans | 0.33 |
| VSK-336 | Cryptococcus magnus | 1.57 |
| VSK-337 | Cryptococcus magnus | 0.57 |
| VSK-338 | Cryptococcus victoriae | 0.74 |
| VSK-339 | Cryptococcus victoriae | 0.79 |
| VSK-340 | Cryptococcus wieringae | 1.19 |
| VSK-341 | Cryptococcus mycelialis | 0.33 |
| VSK-342 | Dioszegia hungarica | 2.01 |
| VSK-343 | Hanseniaspora sp. | 2.32 |
| VSK-344 | Hanseniaspora uvarum | 2.89 |
| VSK-345 | Pichia fabianii | 0.85 |
| VSK-346 | Rhodotorula pinicola | 0.36 |
| VSK-347 | Rhodotorula pinicola | 0.39 |
| VSK-348 | Sporobolomyces ruberrimus | 0.50 |
| VSK-349 | Sporobolomyces roseus | 0.36 |
| VSK-350 | Williopsis californica | 0.60 |
| VSK-351 | Pichia pastoris | 0.64 |
| VSK-352 | Pichia pastoris | 1.01 |
| VSK-353 | Pichia pastoris | 0.96 |
| VSK-354 | Pichia mandshurica | 3.00 |
| VSK-355 | Pichia heedii | 1.26 |
| VSK-356 | Pichia punctispora | 3.32 |
| VSK-357 | Kazachstania unispora | 1.19 |
| VSK-358 | Schizosaccharomyces pombe | 3.49 |
| VSK-359 | Torulaspora delbrueckii | 0.36 |
| VSK-360 | Yarrowia lipolytica | 2.82 |
| VSK-361 | Yarrowia lipolytica | 2.14 |
| VSK-362 | Zygosaccharomyees bailii | 2.08 |
| VSK-363 | Zygosaccharomyces bailii | 2.39 |
| VSK-364 | Zygosaccharomyces bisporus | 0.58 |
| VSK-365 | Candida fluviatilis | 0.76 |
| VSK-366 | Saccharomycopsis capsularis | 0.68 |
| VSK-367 | Zygosaccharomyces rouxii | 2.51 |
| VSK-368 | Candida fluviatilis | 0.68 |
| VSK-369 | Candida humilis | 0.36 |
| VSK-370 | Candida catenulata | 0.47 |
| VSK-371 | Debaryomyces hansenii | 0.38 |
| VSK-372 | Pichia guilliermondii | 1.90 |
| VSK-373 | Candida intermedia | 0.74 |
| VSK-374 | Candida lactis-condensi | 0.78 |
| VSK-375 | Pichia fermentans | 1.22 |
| VSK-376 | Candida pignaliae | 0.60 |
| VSK-377 | Candida pseudolambica | 0.82 |
| VSK-378 | Candida rugosa | 2.69 |
| VSK-379 | Candida sorboxylosa | 2.33 |
| VSK-380 | Kregervanrija fluxuum | 0.28 |
| VSK-381 | Citeromyces matritensis | 0.60 |
| VSK-382 | Debaryomyces polymorphus | 1.11 |
| VSK-383 | Debaryomyces sp. | 1.46 |
| VSK-384 | Dekkera anomala | 0.75 |
| VSK-385 | Dekkera bruxellensis | 0.67 |
| VSK-386 | Dekkera bruxellensis | 0.44 |
| VSK-387 | Pichia burtonii | 0.64 |
| VSK-388 | Pichia burtonii | 0.64 |
| VSK-389 | Kluyveromyces yarrowii | 0.53 |
| VSK-390 | Kodamaea ohmeri | 2.15 |
| VSK-391 | Metschnikowia pulcherrima | 0.83 |
| VSK-392 | Eromothecium coryli | 0.71 |
| VSK-393 | Pichia anomala | 1.22 |
| VSK-394 | Kluyveromyces marxianus | 2.07 |
| VSK-395 | Saturnispora mendoncae | 0.61 |
| VSK-396 | Pichia minuta | 0.53 |
| VSK-397 | Pichia nakasei | 0.50 |
| VSK-398 | Pichia silvicola | 0.50 |
| VSK-399 | Pichia stipitis | 0.60 |
| VSK-400 | Pichia tannicola | 2.29 |
| VSK-401 | Pichia toletana | 0.00 |
| VSK-402 | Schizosaccharomyces japonicus | 0.17 |
| VSK-403 | Pichia haplophila | 0.46 |
| VSK-404 | Zygosaccharomyces bailii | 0.83 |
| VSK-405 | Zygosaccharomyces bisporus | 1.32 |
| VSK-406 | Bulleromyces albus | 0.00 |
| VSK-407 | Pseudozyma antarctica | 0.00 |
| VSK-408 | Pichia stipitis | 0.25 |
| VSK-409 | Cryptococcus wieringae | 0.08 |
| VSK-410 | Sporobolomyces ruberrimus | 3.10 |
| VSK-411 | Cryptococcus diffluens | 0.29 |
| VSK-412 | Cryptococcus curvatus | 0.33 |
| VSK-413 | Lipomyces tetrasporus | 0.46 |
| VSK-414 | Candida shehatae | 0.42 |
| VSK-415 | Lipomyces lipofer | 0.00 |
| VSK-416 | Lipomyces starkeyi | 0.00 |
| VSK-417 | Candida apis | 1.21 |
| VSK-418 | Candida sorbophila | 1.08 |
| VSK-419 | Candida oleophila | 0.75 |
| VSK-420 | Sporidiobolus salmonicolor | 0.50 |
| VSK-421 | Candida apicola | 1.79 |
| VSK-422 | Zygosaccharomyces lentus | 0.29 |
| VSK-423 | Candida saitoana | 0.33 |
| VSK-424 | Pichia guilliermondii | 1.86 |
| VSK-425 | Kluyveromyces lactis | 0.88 |
| VSK-426 | Pichia jadinii | 1.65 |
| VSK-427 | Metschnikowia pulcherrima | 1.50 |
| VSK-428 | Rhodosporidium toruloides | 0.29 |
| VSK-429 | Schizosaccharomyces japonicus | 1.29 |
| VSK-430 | Lachancea thermotolerans | 0.75 |
| VSK-431 | Candida saitoana | 0.71 |
| VSK-432 | Dekkera anomala | 0.42 |
| VSK-433 | Kluyveromyces marxianus | 1.69 |
| VSK-434 | Kluyveromyces marxianus | 1.17 |
| VSK-435 | Candida maltosa | 2.19 |
| VSK-436 | Pichia fabianii | 1.33 |
| VSK-437 | Candida viswanathii | 0.29 |
| VSK-438 | Candida catenulata | 0.42 |
| VSK-439 | Schizosaccharomyces pombe | 1.93 |
| VSK-440 | Kluyveromyces lactis | 0.29 |
| VSK-441 | Kazachstania unispora | 3.28 |
| VSK-442 | Kazachstania unispora | 3.24 |
| VSK-443 | Pachysolen tannophilus | 0.75 |
| VSK-444 | Pachysolen tannophilus | 0.92 |
| VSK-445 | Pichia subpelliculosa | 1.76 |
| VSK-446 | Trigonopsis variabilis | 1.44 |
| VSK-447 | Candida versatilis | 1.99 |
| VSK-448 | Pichia farinosa | 0.54 |
| VSK-449 | Pichia farinosa | 2.04 |
| VSK-450 | Kodamaea ohmeri | 2.25 |
| VSK-451 | Pichia triangularis | 2.08 |
| VSK-452 | Candida diddensiae | 2.17 |
| VSK-453 | Pichia quercuum | 1.96 |
| VSK-454 | Sporidiobolus johnsonii | 0.65 |
| VSK-455 | Debaryomyces coudertii | 0.67 |
| VSK-456 | Candida apicola | 2.33 |
| VSK-457 | Candida humilis | 4.25 |
| VSK-458 | Rhodotorula mucilaginosa | 0.29 |
| VSK-459 | Dekkera anomala | 0.33 |
| VSK-460 | Zygosaccharomyces bailii | 1.18 |
| VSK-461 | Rhodotorula glutinis | 0.33 |
| VSK-462 | Sporobolomyces roseus | 0.25 |
| VSK-463 | Pichia anomala | 2.21 |
| VSK-464 | Candida zeylanoides | 2.03 |
| VSK-465 | Zygosaccharomyces rouxii | 2.29 |
| VSK-466 | Pichia anomala | 2.17 |
| VSK-467 | Zygosaccharomyces bisporus | 0.42 |
| VSK-468 | Lachancea fermentati | 1.51 |
| VSK-469 | Zygosaccharomyces rouxii | 0.46 |
| VSK-470 | Torulaspora microellipsoides | 0.67 |
| VSK-471 | Zygotorulaspora florentinus | 1.61 |
| VSK-472 | Zygosaccharomyces mellis | 0.33 |
| VSK-473 | Lachancea cidri | 2.26 |
| VSK-474 | Zygotorulaspora mrakii | 2.18 |
| VSK-475 | Candida sake | 0.42 |
| VSK-476 | Candida silvae | 1.21 |
| VSK-477 | Sporopachydermia lactativora | 0.46 |
| VSK-478 | Sporopachydermia lactativora | 0.46 |
| VSK-479 | Clavispora lusitaniae | 0.88 |
| VSK-480 | Cryptococcus laurentii | 0.46 |
| VSK-481 | Clavispora lusitaniae | 0.63 |
| VSK-482 | Naumovia dairenensis | 0.63 |
| VSK-483 | Candida membranifaciens | 0.46 |
| VSK-484 | Candida tenuis | 0.46 |
| VSK-485 | Candida membranifaciens | 0.46 |
| VSK-486 | Cystofilobasidium infirmo-miniatum | 0.50 |
| VSK-487 | Candida oleophila | 1.08 |
| VSK-488 | Rhodotorula minuta | 0.42 |
| VSK-489 | Pichia farinosa | 2.29 |
| VSK-490 | Candida solani | 0.61 |
| VSK-491 | Candida sake | 0.63 |
| VSK-492 | Hanseniaspora uvarum | 2.21 |
| VSK-493 | Pichia angusta | 1.79 |
| VSK-494 | Candida entomophila | 0.50 |
| VSK-495 | Candida methanosorbosa | 0.46 |
| VSK-496 | Candida diddensiae | 0.42 |
| VSK-497 | Candida sonorensis | 1.50 |
| VSK-498 | Saccharomyces cerevisiae | 0.88 |
| VSK-499 | Zygosaccharomyces kombuchaensis | 1.10 |
| VSK-500 | Candida mesenterica | 0.54 |
| VSK-501 | Pichia punctispora | 0.54 |
| VSK-502 | Pichia sp. | 1.63 |
| VSK-503 | Pichia sp. | 2.97 |
| VSK-504 | Saccharomyces paradoxus | 2.07 |
| VSK-505 | Pichia fermentans | 1.03 |
| VSK-506 | Kregervanrija fluxuum | 2.58 |
| VSK-507 | Zygosaccharomyces mellis | 1.46 |
| VSK-508 | Lachancea fermentati | 2.25 |
| VSK-509 | Cryptococcus liquefaciens | 0.17 |
| VSK-510 | Filobasidium capsuligenum | 0.36 |
| VSK-511 | Wickerhamomyces anomalus | 1.81 |
| VSK-512 | Dipodascus ingens | 2.00 |
| VSK-513 | Candida santamariae | 0.42 |
| VSK-514 | Filobasidium capsuligenum | 1.06 |
| VSK-515 | Dipodascus ingens | 2.50 |
| VSK-516 | Filobasidium capsuligenum | 0.58 |
| VSK-517 | Candida anatomiae | 0.64 |
| VSK-518 | Lindnera fabianii | 1.15 |
| VSK-519 | Pichia mexicana | 0.46 |
| VSK-520 | Sporopachydermia cereana | 2.10 |
| VSK-521 | Sporopachydermia cereana | 0.33 |
| VSK-522 | Candida sonorensis | 1.54 |
| VSK-523 | Pichia cactophila | 1.47 |
| VSK-524 | Pichia cactophila | 1.25 |
| VSK-525 | Saccharomyces pastorianus | 2.63 |
| VSK-526 | Saccharomyces cerevisiae | 1.72 |
| VSK-527 | Saccharomyces cerevisiae | 2.50 |
| VSK-528 | Saccharomyces cerevisiae | 2.25 |
| VSK-529 | Saccharomyces cerevisiae | 2.75 |
| VSK-530 | Saccharomyces cerevisiae | 2.71 |
| VSK-531 | Saccharomyces cerevisiae | 1.54 |
| VSK-532 | Saccharomyces cerevisiae | 2.79 |
| VSK-533 | Saccharomyces cerevisiae | 3.07 |
| VSK-534 | Saccharomyces cerevisiae | 2.38 |
| VSK-535 | Saccharomyces cerevisiae | 2.22 |
| VSK-536 | Saccharomyces cerevisiae | 2.47 |
| VSK-537 | Saccharomyces cerevisiae | 3.08 |
| VSK-538 | Saccharomyces cerevisiae | 2.35 |
| VSK-539 | Saccharomyces cerevisiae | 2.82 |
| VSK-540 | Saccharomyces cerevisiae | 2.83 |
| VSK-541 | Saccharomyces cerevisiae | 2.88 |
| VSK-542 | Saccharomyces cerevisiae | 2.50 |
| VSK-543 | Saccharomyces cerevisiae | 2.44 |
| VSK-544 | Saccharomyces cerevisiae | 2.63 |
| VSK-545 | Saccharomyces cerevisiae | 3.04 |
| VSK-546 | Saccharomyces cerevisiae | 2.83 |
| VSK-547 | Saccharomyces cerevisiae | 2.44 |
| VSK-548 | Saccharomyces cerevisiae | 2.44 |
| VSK-549 | Saccharomyces cerevisiae | 2.79 |
| VSK-550 | Saccharomyces cerevisiae | 2.93 |
| VSK-551 | Saccharomyces cerevisiae | 3.15 |
| VSK-552 | Saccharomyces cerevisiae | 2.83 |
| VSK-553 | Saccharomyces cerevisiae | 2.85 |
| VSK-554 | Saccharomyces cerevisiae | 3.19 |
| VSK-555 | Saccharomyces cerevisiae | 2.96 |
| VSK-556 | Saccharomyces cerevisiae | 2.92 |
| VSK-557 | Saccharomyces cerevisiae | 2.56 |
| VSK-558 | Saccharomyces cerevisiae | 2.21 |
| VSK-559 | Saccharomyces cerevisiae | 2.24 |
| VSK-560 | Saccharomyces cerevisiae | 2.96 |
| VSK-561 | Saccharomyces cerevisiae | 3.33 |
| VSK-562 | Saccharomyces cerevisiae | 2.97 |
| VSK-563 | Saccharomyces cerevisiae | 3.22 |
| VSK-564 | Saccharomyces cerevisiae | 3.32 |
| VSK-565 | Saccharomyces cerevisiae | 3.35 |
| VSK-566 | Saccharomyces cerevisiae | 3.36 |
| VSK-567 | Saccharomyces cerevisiae | 3.18 |
| VSK-568 | Saccharomyces cerevisiae | 3.29 |
| VSK-569 | Saccharomyces cerevisiae | 3.22 |
| VSK-570 | Saccharomyces cerevisiae | 2.81 |
| VSK-571 | Saccharomyces cerevisiae | 3.75 |
| VSK-572 | Saccharomyces cerevisiae | 3.07 |
| VSK-573 | Saccharomyces cerevisiae | 3.36 |
| VSK-574 | Saccharomyces cerevisiae | 3.22 |
| VSK-575 | Saccharomyces cerevisiae | 3.07 |
| VSK-576 | Saccharomyces cerevisiae | 2.93 |
| VSK-577 | Saccharomyces cerevisiae | 3.60 |
| VSK-578 | Saccharomyces cerevisiae | 3.60 |
| VSK-579 | Saccharomyces cerevisiae | 3.00 |
| VSK-580 | Saccharomyces cerevisiae | 2.99 |
| VSK-581 | Saccharomyces cerevisiae | 3.50 |
| VSK-582 | Saccharomyces cerevisiae | 3.58 |
| VSK-583 | Saccharomyces cerevisiae | 3.11 |
| VSK-584 | Saccharomyces cerevisiae | 3.75 |
| VSK-585 | Saccharomyces cerevisiae | 3.43 |
| VSK-586 | Saccharomyces cerevisiae | 2.93 |
| VSK-587 | Saccharomyces cerevisiae | 3.08 |
| VSK-588 | Saccharomyces cerevisiae | 3.60 |
| VSK-589 | Saccharomyces cerevisiae | 3.79 |
| VSK-590 | Saccharomyces cerevisiae | 2.96 |
| VSK-591 | Saccharomyces cerevisiae | 3.18 |
| VSK-592 | Saccharomyces cerevisiae | 3.47 |
| VSK-593 | Saccharomyces cerevisiae | 3.07 |
| VSK-594 | Saccharomyces cerevisiae | 3.33 |
| VSK-595 | Saccharomyces cerevisiae | 3.79 |
| VSK-596 | Saccharomyces cerevisiae | 3.51 |
| VSK-597 | Saccharomyces cerevisiae | 3.32 |
| VSK-598 | Saccharomyces cerevisiae | 3.53 |
| VSK-599 | Saccharomyces cerevisiae | 2.46 |
| VSK-600 | Saccharomyces cerevisiae | 3.49 |
| VSK-601 | Saccharomyces cerevisiae | 3.36 |
| VSK-602 | Saccharomyces cerevisiae | 3.51 |
| VSK-603 | Saccharomyces cerevisiae | 3.64 |
| VSK-604 | Saccharomyces cerevisiae | 3.50 |
| VSK-605 | Saccharomyces cerevisiae | 1.50 |
| VSK-606 | Saccharomyces cerevisiae | 3.92 |
| VSK-607 | Saccharomyces cerevisiae | 3.28 |
| VSK-608 | Saccharomyces cerevisiae | 3.32 |
| VSK-609 | Saccharomyces cerevisiae | 3.38 |
| VSK-610 | Saccharomyces cerevisiae | 3.39 |
| VSK-611 | Saccharomyces cerevisiae | 3.56 |
| VSK-612 | Saccharomyces cerevisiae | 3.24 |
| VSK-613 | Saccharomyces cerevisiae | 3.21 |
| VSK-614 | Saccharomyces cerevisiae | 3.32 |
| VSK-615 | Saccharomyces cerevisiae | 3.40 |
| VSK-616 | Saccharomyces cerevisiae | 3.24 |
| VSK-617 | Kluyveromyces marxianus | 1.46 |
| VSK-618 | Kluyveromyces marxianus | 2.89 |
| VSK-619 | Kluyveromyces marxianus | 1.13 |
| VSK-620 | Kluyveromyces marxianus | 1.33 |
| VSK-621 | Kluyveromyces marxianus | 1.46 |
| VSK-622 | Kluyveromyces marxianus | 1.46 |
| VSK-623 | Kluyveromyces marxianus | 0.92 |
| VSK-624 | Kluyveromyces marxianus | 0.96 |
| VSK-625 | Kluyveromyces marxianus | 1.39 |
| VSK-626 | Kluyveromyces marxianus | 0.92 |
| VSK-627 | Kluyveromyces marxianus | 1.71 |
| VSK-628 | Kluyveromyces marxianus | 2.17 |
| VSK-629 | Kluyveromyces marxianus | 2.40 |
| VSK-630 | Kluyveromyces marxianus | 1.36 |
| VSK-631 | Kluyveromyces marxianus | 1.40 |
| VSK-632 | Kluyveromyces marxianus | 1.61 |
| VSK-633 | Kluyveromyces marxianus | 0.75 |
| VSK-634 | Kluyveromyces marxianus | 0.83 |
| VSK-635 | Pichia fermentans | 1.33 |
| VSK-636 | Pichia fermentans | 1.92 |
| VSK-637 | Pichia fermentans | 1.81 |
| VSK-638 | Pichia fermentans | 2.24 |
| VSK-639 | Pichia fermentans | 0.96 |
| VSK-640 | Pichia fermentans | 1.72 |
| VSK-641 | Pichia fermentans | 0.33 |
| VSK-642 | Debaryomyces hansenii | 0.46 |
| VSK-643 | Debaryomyces hansenii | 0.54 |
| VSK-644 | Debaryomyces hansenii | 0.08 |
| VSK-645 | Debaryomyces hansenii | 2.83 |
| VSK-646 | Debaryomyces hansenii | 1.46 |
| VSK-647 | Debaryomyces hansenii | 1.74 |
| VSK-648 | Debaryomyces hansenii | 0.33 |
| VSK-649 | Debaryomyces hansenii | 0.50 |
| VSK-650 | Debaryomyces hansenii | 0.38 |
| VSK-651 | Debaryomyces hansenii | 0.71 |
| VSK-652 | Debaryomyces hansenii | 0.83 |
| VSK-653 | Debaryomyces hansenii | 1.04 |
| VSK-654 | Debaryomyces hansenii | 0.33 |
| VSK-655 | Debaryomyces hansenii | 0.42 |
| VSK-656 | Saccharomyces pastorianus | 1.25 |
| VSK-657 | Saccharomyces pastorianus | 1.04 |
| VSK-658 | Saccharomyces pastorianus | 2.51 |
| VSK-659 | Saccharomyces pastorianus | 2.54 |
| VSK-660 | Trichosporon pullulans | 2.60 |
| VSK-661 | Candida sake | 0.63 |
| VSK-662 | Candida sake | 1.17 |
| VSK-663 | Cryptococcus tephrensis | 0.63 |
| VSK-664 | Cryptococcus tephrensis | 0.50 |
| VSK-665 | Trichosporon brassicae | 0.38 |
| VSK-666 | Candida sp. | 2.46 |
| VSK-667 | Yarrowia lipolytica | 2.74 |
| VSK-668 | Candida zeylanoides | 2.08 |
| VSK-669 | Torulopsis sp. | 1.07 |
| VSK-670 | Meyerozyma guilliermondii | 2.17 |
| VSK-671 | Wickerhamomyces anomalus | 1.38 |
| VSK-672 | Yarrowia lipolytica | 2.94 |
| VSK-673 | Candida boidinii | 1.17 |
| VSK-674 | Pichia membranifaciens | 1.63 |
| VSK-675 | Pichia membranifaciens | 2.88 |
| VSK-676 | Candida sp. | 2.36 |
| VSK-677 | Magnusiomyces ingens | 0.75 |
| VSK-678 | Trichosporon dulcitum | 0.83 |
| VSK-679 | Scheffersomyces stipitis | 0.71 |
| VSK-680 | Yarrowia lipolytica | 2.99 |
| VSK-681 | Hanseniaspora uvarum | 1.83 |
| VSK-682 | Hanseniaspora sp. | 2.63 |
| VSK-683 | Priceomyces carsonii | 0.67 |
| VSK-684 | Trichomonascus ciferrii | 1.29 |
| VSK-685 | Trichosporon veenhuisii | 0.42 |
| VSK-686 | Sugiyamaella smithiae | 0.38 |
| VSK-687 | Trichosporon aquatile | 0.71 |
| VSK-688 | Schwanniomyces polymorphus | 2.82 |
| VSK-689 | Priceomyces haplophilus | 1.92 |
| VSK-690 | Debaryomyces robertsiae | 2.38 |
| VSK-691 | Candida rhagii | 0.71 |
| VSK-692 | Metschnikowia reukaufii | 0.88 |
| VSK-693 | Metschnikowia agaves | 0.88 |
| VSK-694 | Komagataella pastoris | 0.33 |
| VSK-695 | Lodderomyces elongisporus | 1.04 |
| VSK-696 | Saccharomyces eubayanus | 1.63 |
| VSK-697 | Candida parapsilosis | 2.04 |
| VSK-698 | Torulaspora delbrueckii | 3.14 |
| VSK-699 | Torulaspora delbrueckii | 1.29 |
| VSK-700 | Hanseniaspora uvarum | 2.00 |
| VSK-701 | Hanseniaspora osmophila | 2.54 |
| VSK-702 | Zygosaccharomyces rouxii | 0.92 |
| VSK-703 | Cryptococcus flavescens | 1.13 |
| VSK-704 | Torulaspora delbrueckii | 2.36 |
| VSK-705 | Wickerhamomyces anomalus | 2.22 |
| VSK-706 | Rhodosporidium toruloides | 0.75 |
| VSK-707 | Candida sp. | 0.71 |
| VSK-708 | Pichia jadinii | 1.13 |
| VSK-709 | Pichia jadinii | 1.17 |
| VSK-710 | Candida humilis | 3.60 |
| VSK-711 | Pichia membranifaciens | 3.04 |
| VSK-712 | Rhodosporidium toruloides | 1.79 |
| VSK-713 | Candida zeylanoides | 2.64 |
| VSK-714 | Candida diddensiae | 0.46 |
| VSK-715 | Pichia membranifaciens | 1.67 |
| VSK-716 | Saccharomyces cerevisiae | 1.92 |
| VSK-717 | Candida mesenterica | 2.13 |
| VSK-718 | Saccharomyces cerevisiae | 2.79 |

### Example 2: Bioinformatic Genome Mining for Pathway Enzyme Candidates

[0067] Homology-based database searches were conducted to identify candidate enzymes for a particular functionality. In each case, the databases were searched with a number of query sequences. Additionally, members of the relevant protein family were retrieved from Uniprot/SwissProt based on the InterPro domain annotations. The homology-based searches were conducted against Uniprot (SwissProt and TrEMBL) and GenBank protein databases (nr, pat and env_nr) using blastp, and against GenBank nucleotide databases (tsa_nt, env_nt and pat) using tblastn. Sequences with an E-value smaller than 1e-30 were extracted; however, in some cases, additional analysis was conducted on sequences with an E-value smaller than 1e-80. Nucleotide hits were translated to protein sequences with GeneWise using the query sequence as a guide in the translation. The task of translating the long ACC sequences was too difficult for GeneWise, so instead the protein sequence (portion matching to the query sequence) was extracted from the blast-xml output. To remove redundant sequences, the retrieved sequences were clustered, using BLASTCLUST or CD-HIT, to clusters containing sequences above 80% identical to each other. Only one representative sequence was kept from each cluster. The non-redundant set of sequences was aligned, either to the PFAM domain of the protein family or by using MAFFT. Global alignment by MAFFT was created in cases where the protein family was not associated with any PFAM or if the protein's sequence was split to several PFAM domains. A phylogenetic tree was created based on the multiple sequence alignment using PHYLIP or FASTTREE. The tree was annotated with E.C. numbers, organism name, blast E-values, and visualized using the Geneious software.

[0068] 2-1: Acetylating Acetaldehyde Dehydrogenase

[0069] The reduction of acetaldehyde to acetyl-CoA can be accomplished by an acetylating acetaldehyde dehydrogenase (AADH, E.C. 1.2.1.10). AADHs can be divided into three groups of functional homologues (Wei et al., Nat. Commun. 4:2580, 2013), including 1) bifunctional proteins having AADH and alcohol dehydrogenase activities (E. coli adhE type genes, GenBank No: NP_415757, query sequence), 2) proteins involved in ethanolamine catabolism (E. coli eutE type genes, GenBank No: AAG57564, query sequence) and 3) bifunctional proteins that are part of an aldolase-dehydrogenase complex involved in 4-hydroxy-2-ketovalerate catabolism (E. coli mphF type genes, GenBank No: NP_414885). Of particular interest are the group 1 (adhE type) and group 2 (eutE type) enzymes.

[0070] The N-terminal domain of the AdhE protein is highly homologous to aldehyde:NAD+ oxidoreductases, whereas the C-terminal region is homologous to a family of Fe2+-dependent ethanol:NAD+ oxidoreductases (Membrillo-Hernandez et al., J. Biol. Chem. 275:33869-33875, 2000). Acetylating acetaldehyde dehydrogenase activity can also be introduced to the cell by truncating the bifunctional AdhE protein to only possess the N-terminal aldehyde reductase domain by removing the alcohol dehydrogenase domain. Additional genes having this bifunctional AADH activity were inferred based on bioinformatic analyses and sequence homology. The various genes are summarized in Table 1.

[0071] Many enterobacteria can utilize ethanolamine as a carbon and nitrogen source (Stojiljkovic et al., J. Bacteriol. 177:1357-1366, 1995). This catabolic pathway involves a step where acetaldehyde is converted by acetylating acetaldehyde dehydrogenase, EutE, to acetyl-CoA. Novel genes having this AADH activity were inferred based on bioinformatic analyses and sequence homology. The various genes are summarized in Table 2.

[0072] In addition, based on bioinformatic analyses and sequence homology to the adhE and eutE type genes, there is a group of genes annotated as aldehyde dehydrogenases which can be inferred to have AADH activity. The various genes are summarized in Table 3.

[0073] 2-2: Eukaryotic Acetyl-CoA Carboxylase

[0074] Acetyl-CoA carboxylase (ACC, EC 6.4.1.2) is a multifunctional biotin-dependent carboxylase that is a key enzyme of fatty acid biosynthesis. It uses the cofactors ATP and biotin to catalyse the conversion of acetyl-CoA to malonyl-CoA. The reaction proceeds in two steps. First, the biotin carboxylase catalyses the ATP-dependent carboxylation of biotin with bicarbonate. Second, the carboxyl transferase transfers the carboxyl group from biotin to acetyl-CoA to form malonyl-CoA. Eukaryotic enzymes are large multidomain enzymes whereas corresponding prokaryotic enzymes consist of multiple subunits encoded by distinct genes.

[0075] The activity of ACC is controlled at the transcriptional level and also at the post-transcriptional level (e.g. by phosphorylation and aggregation) in order to sustain acetyl-CoA homeostasis. ACC engineering in different yeast species has resulted in increased ACC activity and increased production of malonyl-CoA derived products. Genes encoding for enzymes having ACC activity have been demonstrated or postulated in Saccharomyces cerevisiae (GenBank No: CAA96294.1, query sequence), Yarrowia lipolytica (GenBank No: XP_501721.1, query sequence) and Mucor circinelloides (GenBank No: EPB82652.1, query sequence). Candidate acetyl-CoA carboxylase genes were identified in the newly sequenced genomes of Kazachstania exigua (SEQ ID NO: 1) and Candida humilis (SEQ ID NO: 2) and cloned into our yeast expression plasmid. Additional genes having ACC activity were inferred based on bioinformatic analyses and sequence homology. The various eukaryotic multidomain ACC genes are summarized in Table 4.

[0076] 2-3: Bifunctional Malonyl-CoA Reductase

[0077] The reduction of malonyl-CoA to 3-HP (via a malonate semialdehyde intermediate) can be accomplished by a large bifunctional malonyl-CoA reductase which possesses both functionalities of C-terminal aldehyde dehydrogenase domain and N-terminal alcohol dehydrogenase domain. A highly substrate-specific and NADPH-dependent enzyme with this activity was characterized in the phototrophic green nonsulfur bacterium Chloroflexus aurantiacus (GenBank No: AAS20429.1; query sequence) which participates in an autotrophic CO₂ fixation pathway termed the 3-hydroxypropionate cycle (Hugler et al., J. Bacteriol. 184:2404-2410, 2002). Additional genes having this bifunctional malonyl-CoA reductase activity were inferred based on bioinformatic analyses and sequence homology. The various genes are summarized in Table 5.

[0078] 2-4: Malonyl-CoA Reductase

[0079] In contrast to the bifunctional malonyl-CoA reductases discussed above, malonyl-CoA can also be catalyzed to 3-HP by two separate enzymes. By this route, malonyl-CoA is first reduced to malonate semialdehyde by malonyl-CoA reductase (MCR; EC 1.2.1.75) or a CoA-acylating malonate semialdehyde dehydrogenase and then subsequently reduced to 3-HP by a 3-hydroxypropionate dehydrogenase (3-HPDH; EC 1.1.1.59 or EC 1.1.1.298). MCR is an NADPH-dependent enzyme used by some thermoacidophilic archaea to autotrophically fix carbon into organic material via a 3-hydroxypropionate/4-hydroxybutyrate cycle (Berg et al., Science, 318:1782-1786, 2007). Genes encoding for enzymes having this MCR activity are characterized in Metallosphaera sedula (GenBank No: ABP94884.1, query sequence) and Sulfolobus tokodaii (GenBank No: BAB67276.1, query sequence). Although these MCRs share a similar aldehyde dehydrogenase activity to the Chloroflexus aurantiacus bifunctional malonyl-CoA reductase enzymes, they do not exhibit any significant sequence similarity suggesting that the autotrophic pathways in Chloroflexus and Sulfolobaceae evolved convergently and that different genes were recruited to execute similar metabolic processes in these taxonomic groups (Alber et al., J. Bacteriol. 188:8551-8559, 2006). In particular, the archaeal MCRs show high sequence similarity to aspartate-semialdehyde dehydrogenases. Additional genes having this MCR activity were inferred based on bioinformatic analyses and sequence homology. The various genes are summarized in Table 6.

[0080] 2-5: 3-Hydroxypropionate Dehydrogenase

[0081] Malonate semialdehyde can be reduced to 3-HP by a reversible 3-hydroxypropionate dehydrogenase (HPDH; EC 1.1.1.59, NADH-dependent) or a malonate semialdehyde reductase (EC 1.1.1.298, NADPH-dependent). These enzymes naturally participate in beta-alanine metabolism, propanoate metabolism or uracil degradation in bacteria and plants. In addition, these enzymes are required by some thermoacidophilic archaea for fixing carbon via the 3-hydroxypropionate/4-hydroxybutyrate cycle (Kockelkorn and Fuchs, J. Bacteriol. 191:6352-6362, 2009). Genes encoding for enzymes having 3-hydroxypropionate dehydrogenase or malonate semialdehyde reductase activity have been demonstrated or postulated in Escherichia coli (GenBank No: EFV00080.1, query sequence), Saccharomyces cerevisiae (GenBank No: DAA10125.1, query sequence), Metallosphaera sedula (GenBank No: ABP96133.1, query sequence), Sulfolobus tokodaii (GenBank No: BAK54608.1, query sequence) and Escherichia coli (GenBank No: ACR64730.1, query sequence). Additional genes having 3-hydroxypropionate dehydrogenase or malonate semialdehyde reductase activity were inferred based on bioinformatic analyses and sequence homology. The various genes are summarized in Table 7.

[0082] 2-6: 3-Hydroxyisobutyrate Dehydrogenase

[0083] 3-Hydroxyisobutyrate dehydrogenase (HIBADH; EC 1.1.1.31) is a key enzyme involved in the metabolism of valine and the other branched-chain amino acids. HIBADH catalyzes the NADH- or NADPH-dependent reversible conversion of 3-hydroxyisobutyrate to methylmalonate semialdehyde. However, as a result of its wide substrate specificity, HIBADH has also been shown to exhibit 3-hydroxypropionate dehydrogenase activity (i.e. EC 1.1.1.59) by converting malonate semialdehyde to 3-HP (Yao et al., Appl. Biochem. Biotechnol. 160:694-703, 2010). Enzymes with HIBADH activity have been identified in Pseudomonas putida (GenBank No: ADR61938.1, query sequence), Pseudomonas aeruginosa (GenBank No: AAG06957.1, query sequence), Bacillus cereus (GenBank No: AAP10961.1, query sequence) and Alcaligenes faecalis (GenBank No: EJC65559.1, query sequence). Additional genes having this HIBADH activity were inferred based on bioinformatic analyses and sequence homology. The various genes are summarized in Table 8.

[0084] 2-7: 4-Hydroxybutyrate Dehydrogenase

[0085] 4-Hydroxybutyrate dehydrogenase (HBDH; EC 1.1.1.61) is an enzyme naturally involved in butanoate metabolism. HBDH catalyzes the reversible NAD+-dependent conversion of 4-hydroxybutanoate to succinate semialdehyde. However, HBDH can also convert malonate semialdehyde to 3-HP as the enzymatic reaction is similar. Enzymes with HBDH activity have been identified in Cupriavidus necator (GenBank No: AAC41425.1, query sequence) and Clostridium kluyveri (GenBank No: EDK35022.1, query sequence). Additional genes having this HBDH activity were inferred based on bioinformatic analyses and sequence homology. The various genes are summarized in Table 9.

[0086] 2-8: 3-Hydroxybutyrate Dehydrogenase

[0087] 3-Hydroxybutyrate dehydrogenase (BDH; EC 1.1.1.30) is an enzyme that is naturally involved in butanoate metabolism. BDH catalyzes the reversible NAD+-dependent conversion of 3-hydroxybutyrate to acetoacetate but it can also oxidize other 3-hydroxymonocarboxylic acids. For example, BDH can convert malonate semialdehyde to 3-HP as the enzymatic reaction is similar. An enzyme with BDH activity has been identified in Pseudomonas aeruginosa (GenBank No: GAA17557.1, query sequence). Additional genes having this BDH activity were inferred based on bioinformatic analyses and sequence homology. The various genes are summarized in Table 10.

### Example 3: Measurement of Enzyme Activities

[0088] ACC Spectrophotometric Enzyme Assays

[0089] Spectrophotometric ACC assays are coupled assays where a product produced by the ACC reaction is further consumed in a reaction which requires the cofactor NAD(P)H whose oxidation can be monitored with a spectrophotometer.

[0090] Kroeger et al. (2011, Anal. Biochem. 411:100-105) described a coupled assay where malonyl-CoA produced by ACC1 is converted further to malonate semialdehyde by purified malonyl-CoA reductase (MCR) in a reaction that requires NADPH as a cofactor. ACC activity was measured by following NADPH oxidation.

[0091] Diacovich et al. (2002, J. Biol. Chem. 277:31228-31236) combined the conversion of ADP, a hydrolysis product of ATP which is used as a cofactor in the ACC reaction, to an ADP-requiring pyruvate kinase reaction which was further coupled to the formation of pyruvate using lactate dehydrogenase. The latter enzyme requires NADH as a cofactor whose oxidation was followed.

[0092] ACC Radioactive Enzyme Assays

[0093] The most commonly used in vitro ACC assay is based on the usage of radioactive ¹⁴C carbonate. The incorporation of radioactive carbonate into an acid and a non-volatile material (i.e. malonyl-CoA) is followed. The ¹⁴C-labelled sodium bicarbonate which has not been converted to malonyl-CoA is removed by an acid and heat treatment which converts the remaining NaH₁₄CO₃ and the possible side products of the reaction into ¹⁴C-labelled CO₂.

[0094] This assay described by Diacovich et al. (2002, J. Biol. Chem. 277:31228-31236) has been used to detect ACC activity from yeast lysates (Shi et al. 2014, mBIO 5:3 e01130-14) with slight modifications. The cell lysates were prepared from yeast cells harvested during late exponential or stationary phase. The cells were washed and then resuspended in lysis buffer containing 100 mM potassium phosphate pH 7.5, 2 mM MgCl₂, 1 mM dithiothreitol and 1×EDTA free Complete protease inhibitor (Roche). The cells were disrupted by glass beads and the supernatant was collected after centrifugation at 4° C.

[0095] The ACC enzyme assay reaction mixture included 100 mM potassium phosphate (pH 8.0), 300 μg of BSA, 3 mM ATP, 5 mM MgCl₂, 10 mM NaH₁₄CO₃ [specific activity 200 μCi mmol⁻¹ (7400 kBq mmol)] and 0.5 mM acetyl-CoA. Total volume of the reaction was 100 μL which included 20 μL of cell extract.

[0096] The reaction was incubated at 30° C. for 15 min, and stopped by adding 50 μL of 5 M HCl. The contents of the tubes were evaporated to dryness at 95° C. and the residue was resuspended in 100 μL of water and mixed with 3 mL of scintillation cocktail (Ultima Gold AB, PerkinElmer). The ¹⁴C content of the samples was determined using a liquid scintillation counter (PerkinElmer Tri-Carb 2810TR).

[0097] AADH Enzyme Assay

[0098] AADH activity was measured as described by Kozak et al. (2014, Metab. Eng. 21:46-59) by monitoring the reduction of NAD⁺ at 340 nm at 30° C. The yeast cells for the cell lysates were collected, washed with water, and then resuspended into lysis buffer containing 100 mM Tris-HCl buffer (pH 7.5) and 1×EDTA free protease inhibitor cocktail (Roche). The cells were lysed with glass beads in a Precellys 24 homogenizer at 5500 rpm for 3×40 seconds and kept on ice between rounds. Lysates were centrifuged at 16 000 g for 20 min at 4° C. and supernatants were collected. The total protein concentration was determined using the Bradford method.

[0099] The enzyme assay reaction mixture contained 0.1 mM Coenzyme A, 50 mM CHES buffer (pH 9.5), 0.8 mM NAD⁺, 0.2 mM DTT and 10 μL of cell extract in a total reaction volume of 200 μL. The reaction was started by adding 10 mM of freshly prepared acetaldehyde solution and reduction of NAD⁺ was followed with a Thermo Konelab 20XT analyser.

[0100] MCR Enzyme Assay from Yeast Cell Lysates

[0101] The MCR enzyme activity was measured according to the method described by Chen et al. (2014, Metab. Eng. 22:104-109) with slight modifications. The method is based on monitoring the oxidation of NAD(P)H at 340 nm.

[0102] Cells were collected and washed with cold wash buffer containing 20 mM Tris-HCl (pH 7.5), 20 mM NaN₃ and then resuspended in 1 mL of breaking buffer containing 50 mM HEPES (pH 7.5), 150 mM KCl, 1 mM DTT, 1 mM EDTA, 0.5% Triton X-100 and 1×EDTA free protease inhibitor cocktail (Roche). The cells were lysed with glass beads in a Precellys 24 homogenizer at 5500 rpm for 3×40 seconds and kept on ice between rounds. Lysates were centrifuged at 16 000 g for 20 min at 4° C. and supernatants were collected. The total protein concentration was determined using the Bradford method.

[0103] The MCR assay mixture contained 50 mM Tris-HCl buffer (pH 8.0), 5 mM MgCl₂ and 0.3 mM NADPH or NADH. After adding 20 ?L of cell lysate into a total reaction volume of 200 μL, the reaction was pre-incubated for five minutes at 30° C. after which the reaction was started by addition of 0.15 mM malonyl-CoA. The assay was monitored at 340 nm with a Thermo Konelab 20XT analyser.

[0104] Generation of Yeast Expression Vectors

[0105] A series of yeast expression plasmids were generated in order to evaluate the candidate genes for their expression and activity capabilities in yeast. First, a new pBlueScript-based multiple cloning site (MCS) was designed so that all possible restriction enzyme (RE) site combinations could be utilized. This modified MCS was then placed into the pRS-based series of yeast centromeric and multicopy plasmids. Afterwards, using a set of 10 unique RE sites, nine different sets of promoters and terminators were cloned into these pRS-based yeast expression vectors. Thus, this plasmid system could be utilized to constitutively express up to 9 genes simultaneously at either a low or high copy number in a suitable yeast strain in order to evaluate a variety of pathway enzyme combinations for the production of 3-HP.

[0106] Cloning of the ACC Genes

[0107] ACCT genes which have been transformed into the industrial S. cerevisiae VSK-128 strain with and without a SNF1 deletion are presented in Table 13. ACC genes were expressed from a multicopy plasmid where they were under control of the PDC1 promoter. Mutated ACC1sc genes described in a publication by Shi et al. (2014) were constructed with a QuikChange II Site Directed Mutagenesis Kit (Agilent Technologies).

TABLE 13
Acetyl-CoA carboxylase genes transformed
to S. cerevisiae VSK- 128.

| | |
|---|---|
| ACC1sc | S. cerevisiae wild-type ACC1 |
| ACC1sc^{S659A} | S. cerevisiae S659A mutant ACC1 |
| ACC1sc^{S1157A} | S. cerevisiae S1157A mutant ACC1 |
| ACC1sc^{S659A/S1157A} | S. cerevisiae S659A/S1157A mutant ACC1 |
| ACC1ch | C. humilis wild-type ACC |
| ACC1ke | K. exigua wild-type ACC |
| ACC1mc | M. circinelloides wild-type ACC |
| ACC1yl | Y. lipolytica wild-type ACC |

[0108] ACC Enzyme Assays

[0109] In the literature spectrophotometric assays have been used to detect ACC enzyme activity with purified or partially purified ACC enzymes. Spectrophotometric assays were tested with yeast cell lysates where ACC had been overexpressed but no absorbance change was detected compared to the controls.

[0110] The radioactive ACC enzyme assay is very sensitive, even pmol/mg/min activities can be detected. The method was first tested with purified human ACC enzyme which is commercially available. As clear activity was detected the method was further optimised to detect ACC activity from yeast cell lysates. The strains listed in the Table 13 were assayed for their ACC1 activity and based on the results; a list describing the relative ranking of the ACC1s was made (FIG. 2). The most promising candidate, ACCy1 was studied more and the results of the S. cerevisiae S-128 wild-type strain and the same strain where ACC1 has been overexpressed are presented in Table 14.

TABLE 14
Overexpression of the ACCyl gene resulted in a 2.9-fold increase
in the ACCl enzyme activity compared to the endogenous ACCl activity
of the wild-type S. cerevisiae VSK-128 strain.

| | Mean ACC1 activity | | |
|---|---|---|---|
| | (pmol min⁻¹ mg | Std. | # of |
| | total protein⁻¹) | Dev. | replicates |
| S. cerevisiae | 25.55 | 0.74 | 2 |
| VSK-128 wild-type | | | |
| S. cerevisiae | 73.79 | 17.23 | 4 |
| VSK-128 (ACC1yl) | | | |

[0111] AADH In Vitro Enzyme Activity Assays

[0112] Five AADH genes were originally chosen (i.e. ADHEpm, ADHEec, EUTec, EUTdz and LIN11291i) and transformed into the CEN.PK lab strain. These AADHs were expressed from a multicopy plasmid where they were under control of the TEF1 promoter. All five AADH genes showed AADH activity, but the three eutE-type AADH genes (i.e. EUTec, EUTdz and LIN11291i) gave much higher AADH activity in yeast compared to the adhE-type AADHs (i.e. ADHEpm and ADHEec).

[0113] Twenty additional novel AADH genes were chosen from the genome mining analyses to be evaluated for expression and enzyme activity in yeast. These twenty novel AADH genes were tested for in vitro enzyme activity and four of them (i.e. AADHmm, AADHab, AADHbw and AADHvs) were shown to have AADH activity.

[0114] AADH In Vivo Growth Assays

[0115] All copies of the ACS2 gene were deleted from the industrial S. cerevisiae VSK-128 strain in order to generate a strain with a defective PDH-bypass that was incapable of growth on glucose-based medium. Expression vectors carrying the 25 different AADH variants were then transformed into this ACS2 deletion strain to evaluate their ability to recover the growth of this strain on glucose.

[0116] Twelve different AADH variants (i.e. EUTEec, EUTEdz, LIN11291i, AADHmm, AADHtl, AADHab, AADHta, AADHbs, AADHbw, AADHvs, AADHhs and ADHEec) were capable of recovering the growth deficiency of the ACS2-deletion strain based on their capability to grow on glucose-based agar plates. There was a good correlation between the in vitro AADH enzyme activity assays and the in vivo growth recovery analyses.

[0117] The growth rate of the first nine AADH variant strains which were found to be capable of recovering growth of the ACS2 deletion strain were then evaluated in liquid shake flask cultivations and compared to the wild-type strain containing the intact PDH-bypass. All nine of these AADH variants were able to maintain>50% of the S. cerevisiae VSK-128 strain's aerobic growth rate when grown on glucose and six of these AADH variants were able to maintain ≧80% of the S. cerevisiae VSK-128 strain's aerobic growth rate.

[0118] MCR Enzyme Assays in Yeasts

[0119] The eight full-length Chloroflexus MCR homologues were truncated into their two functional domains and the MCR-specific domains were assayed for enzyme activity in yeast along with the six archaeal MCRs. These MCRs were expressed from a multicopy plasmid where they were under control of the TEF1 promoter and transformed into the CEN.PK lab strain.

[0120] MCRca (Chloroflexus aurantiacus) and its homologue MCRrc (Roseiflexus castenholzii) were the only two Chloroflexus MCR homologues that gave MCR enzyme activities higher than the wild-type strain when utilizing NADPH as a cofactor. No enzyme activity was observed from these eight Chloroflexus MCR homologues when utilizing NADH as a cofactor.

[0121] Three of the archaeal MCRs [Sulfolobales archaeon, Sulfolobus acidocaldarius (×2)], gave MCR enzyme activities higher than the wild-type strain when utilizing NADPH as a cofactor and all six of the archaeal MCRs gave MCR enzyme activities higher than the wild-type strain when utilizing NADH as a cofactor.

[0122] Heterologous Expression and Characterization of Archaeal MCRs

[0123] pBAT T7 promoter based expression constructs were made for four different archaeal MCRs, Metallosphaera sedula (MCRms), Sulfolobus tokodai (MCRst), Candidatus caldiarchaeum (MCRcc), and Sulfolobales archaeon (MCRsa1). These constructs do not contain a purification tag and were E. coli codon optimized and expressed under the conditions described earlier in this report (Table 15).

TABLE 15
Overview of the archeal MCRs constructs for expression in E. coli.
(ca—Chloroflexus aurantiacus, ms—Metallosphaera sedula,
st—Sulfolobus tokodaii, cc—Candidatus caldiarchaeum,
sa1—Sulfolobales archaeon, sa2—Sulfolobales acidocaldarius)

| | Position of | Length of | Calculated |
|---|---|---|---|
| | the StrepII | the MCR | MW of the |
| MCR Variant | tag | gene (bp) | MCR (kDa) |
| MCRca (E. coli codon optimized) | N-terminal | 2037 bp | 74.5 |
| MCRms (Yeast codon optimized) | C-terminal | 1098 bp | 40.4 |
| MCRst (Yeast codon optimized) | C-terminal | 1095 bp | 40.3 |
| MCRms (E. coli codon optimized) | N-terminal | 1098 bp | 40.4 |
| MCRsa1 (E. coli codon optimized) | N-terminal | | |
| MCRst (E. coli codon optimized) | N-terminal | | |
| MCRcc (E. coli codon optimized) | N-terminal | | |
| MCRms (E. coli codon optimized) | No tag | 1098 bp | 40.4 |
| MCRsa1 (E. coli codon optimized) | No tag | 1074 bp | 40 |
| MCRst (E. coli codon optimized) | No tag | 1095 bp | 40.3 |
| MCRcc (E. coli codon optimized) | No tag | 1053 bp | 40 |
| MCRsa2 (E. coli codon optimized) | No tag | 1065 bp | 39.2 |

[0124] Their activity was analyzed using the following assay conditions: 0.4 mM NAD(P)H; 0.15 mM Malonyl-CoA; Tris-HCl pH 7; 2 mM MgCl₂. Assays on 20 times diluted lysates were performed in microtitre plate (MTP) format at RT. The oxidation of NADPH or NADH at A³⁶⁵ in time was followed. Among the four archaeal genes tested, MCRsa1 and MCRst showed the highest MCR activity. However, the MCR activities were smaller than that measured for the tagged MCRca. No activity on NADPH or NADH could be measured (in the E. coli cell lysate) for the Candidatus caldiarchaeum MCR (MCRcc).

[0125] When analysing these constructs using SDS-PAGE gels, MCRsa1 showed the highest expression levels in the E. coli lysate, while MCRcc could not be expressed in a soluble form; see the gel (sa1>ca>st>ms>cc) (FIG. 3). Constructs MCRsa1 and MCRst seem to have dual cofactor preference and showed about 40-50% relative NADH activity when compared to that measured on NADPH. In terms of specific activity, MCRst may be the most active enzyme of the four archaeal MCRs tested, since it showed a relative high activity level at a relatively low expression level.

### Example 4: Production of 3-HP by Culturing a Recombinant Yeast

[0126] Shake Flask Cultivations for S. cerevisiae

[0127] A small loop of cells was taken from strains freshly grown on selective agar-based plates and used to inoculate 20 mL of selective SC-based medium (20 g/L of glucose) in a 250 mL flask and grown for 2 days (30° C., 250 rpm) until all glucose and ethanol had been consumed. The final cell density was measured and the cultures were centrifuged for 5 min at 4000 rpm. The supernatants were then analysed by HPLC or GC/MS to determine the accumulation of 3-HP and other major metabolites in the culture supernatants. However, other cultivation conditions were also tested depending on the particular strain and objective (e.g. starting amount of glucose, amount of aeration, type of medium and addition of additional substances to the medium, etc.).

### Example 5: Bioreactor Cultivations for S. cerevisiae

[0128] Cultures were carried out in Multifors bioreactors (maximum working volume 500 mL, 2 4-bladed Rusthon turbine impellors, Infors HT, Switzerland) containing 250 500 mL medium. Cultures were maintained at 30° C., 300 or 900-950 rpm, with 1.2, 2.4 or 3.6 volume gas (volume culture)⁻¹ min⁻¹ (vvm) initially. Culture pH was kept constant at pH 5.5±0.2 by the addition of sterile 2 M NaOH or 2 M H₃PO₄. Clerol FBA 3107 antifoam (Cognis France, Ponthierry Paris; 0.03% v/v) was added to control foam production. Gas concentration (CO₂, O₂, N₂ and Ar) was analysed continuously in a Prima Pro Process mass spectrometer (Thermo Scientific, UK) calibrated with 3% CO₂ in Ar, 5% CO₂ with 0.99% Ar and 15% O₂ in N₂, 20% O₂ plus 20% Ar in N₂, and 0.04% ethanol in N₂.

[0129] Strains were pre-grown overnight in shaken flasks in SCD-based selective medium and used to inoculate the bioreactors. The batch phase of the cultures (20 g/L initial glucose) was allowed to continue for 14 to 20 h and the glucose feed was started only after glucose had been consumed, but either after or before ethanol had been consumed (depending on the cultivation objective). The glucose feed rate was maintained at 0.38-0.65 g L⁻¹ h⁻¹ (depending on the cultivation objective). Supernatant samples were then analysed by HPLC to determine the accumulation of 3-HP and other major metabolites in the cultures.

### Example 6: 3-HP Analysis from Cell Culture Supernatants by HPLC

[0130] The culture supernatant samples were analysed with Waters Alliance e2695 HPLC system (Waters, Milford, USA) where the injection volume was 10 μl. An Aminex HPX-87H Organic Acid Column (300 mm×7.8 mm) (Bio-Rad, USA) linked to a Fast Acid Analysis Column (100 mm×7.8 mm) (Bio-Rad, USA) was used as a stationary phase in the HPLC. Columns were maintained at +55° C. and 5.0 mM H₂SO₄ (Merck KgaA, Germany) was used as an eluent with the flow rate of 0.3 or 0.5 ml min⁻¹. Waters 2489 dual wavelength UV (210 nm) detector (Waters, Milford, USA) and Waters 2414 differential refractometer (Waters, Milford, USA) were used for the detection of 3-hydroxypropionic acid, glucose, acetate, succinate, pyruvate, glycerol and ethanol.

### Example 7: 3-HP Analysis from Cell Culture Supernatants by GC/MS

[0131] The test samples and standard curve were prepared in the following way: Supernatant (0.5 ml) was acidified with 50 μl of HCl (6N) and spiked with 3-HPA (TCI) standard (in ethylacetate). 5 μl of the lactic acid internal standard solution (Sigma Aldrich (ISOTEC) sodium L-lactate-3,3,3-d3 98 atom %; 5.5 g/1) and approximately 0.2 g of NaCl were added. Since labelled 3-HP is not commercially available, this lactic acid stable isotope product was chosen as the internal standard since it was the most structurally/chemically similar compound to 3-HP that was available which is not present in the sample matrix. The mixture was shaken for approximately 3 min in a vortex mixer. The sample was then extracted two times with 0.5 ml of ethyl acetate by mixing for approximately 3 min in a vortex mixer. The layers were separated by centrifuging at 10 000 rpm for 5 min. The upper layers were collected into a GC vial and evaporated. The dried residues were derivatized with MSTFA (50 μl) containing 1% of TMCS by incubating at 60° C. for 1 h. The standards for the calibration curve were extracted in the same way as the samples in order to minimize errors.

[0132] The samples were run on an Agilent 6890 gas chromatograph (GC) combined with Agilent 5973 mass selective detector (MSD). The injector (injection volume 1 μl with split ratio 20:1) and MSD interface temperatures were 280° C., and the oven temperature program was from 50° C. to 280° C. at a rate of 20° C./min. The analyses were performed on an Agilent HP-5MS capillary column (30 m, ID 200 μm, film thickness 0.25 μm; Agilent 19091S-433). The identifications of the compounds were based on a spectral search from the NIST library. 3-HP was detected by monitoring m/z 147 and m/z 219 and 3-HP dimer was detected by monitoring m/z 177. Five point calibration curves (c=1-400 mg/1) were constructed by using the 3-HP responses and an internal standard was used for normalization. The quantification proved to be linear at this concentration range. Blank samples were analysed together with the samples.

### Example 8: Evaluation of S. cerevisiae Plasmid Expression Strains

[0133] The 3-HP plasmid expression strains simultaneously expressed one, two or three 3-HP pathway enzymes (i.e. AADH, ACC1, MCR and HPDH) from two different expression plasmids (i.e. pSK-084 and/or pSK-085) (FIG. 4). These strains were used to evaluate the effects of the different 3-HP pathway enzymes (and combinations of these enzymes) on the production of 3-HP in the VSK-128 acid-tolerant S. cerevisiae strain. The strains were cultivated in 20 mL of selective SC-based medium (20 g/L of glucose) in 250 mL flasks and grown for 2 days (30° C., 250 rpm) until all glucose and ethanol had been consumed.

### Example 9: Summary of the In Vivo Pathway Enzyme Activity Analyses

[0134] Twenty-five AADHs, 8 ACC1s, 10 bifunctional HPDH-MCRs, 6 Archaeal MCRs and 28 HPDHs in Table 16 were analyzed for their ability to produce 3-HP in various S. cerevisiae strains which were also expressing additional 3-HP pathway enzymes if needed. Many novel 3-HP pathway enzymes (obtained from the genome mining analyses) were shown to be active in yeast and many of them were shown to possess superior properties (i.e. higher activities, better cofactor preference) when compared to previously published 3-HP pathway enzymes.

TABLE 16

| Type | Gene Abbreviation | SEQ ID NOs. |
|---|---|---|
| Genes encoding | AADHab | SEQ ID NO: 3 |
| AADHs | AADHal | SEQ ID NO: 4 |
| | AADHbs | SEQ ID NO: 5 |
| | AADHbw | SEQ ID NO: 6 |
| | AADHcs | SEQ ID NO: 7 |
| | AADHho | SEQ ID NO: 8 |
| | AADHhs | SEQ ID NO: 9 |
| | AADHma1 | SEQ ID NO: 10 |
| | AADHma2 | SEQ ID NO: 11 |
| | AADHmm | SEQ ID NO: 12 |
| | AADHpa | SEQ ID NO: 13 |
| | AADHpb | SEQ ID NO: 14 |
| | AADHpe | SEQ ID NO: 15 |
| | AADHrw | SEQ ID NO: 16 |
| | AADHsl | SEQ ID NO: 17 |
| | AADHss | SEQ ID NO: 18 |
| | AADHta | SEQ ID NO: 19 |
| | AADHtl | SEQ ID NO: 20 |
| | AADHtm | SEQ ID NO: 21 |
| | AADHvs | SEQ ID NO: 22 |
| | ADHEec | SEQ ID NO: 23 |
| | AHEpm | SEQ ID NO: 24 |
| | EUTEdz | SEQ ID NO: 25 |
| | EUTEec | SEQ ID NO: 26 |
| | LIN1129li | SEQ ID NO: 27 |
| Genes encoding | ACC1sc_S659A | SEQ ID NO: 28 |
| ACC1s | ACC1sc_S659A/S1157A | SEQ ID NO: 29 |
| | ACC1sc_S1157A | SEQ ID NO: 30 |
| | ACC1ke | SEQ ID NO: 31 |
| | ACC1mc | SEQ ID NO: 32 |
| | ACC1sc | SEQ ID NO: 33 |
| | ACCyl | SEQ ID NO: 34 |
| | ACC1ch | SEQ ID NO: 35 |
| Genes encoding | HPDH-MCRbs | SEQ ID NO: 36 |
| bifunctional HPDH- | HPDH-MCRca | SEQ ID NO: 37 |
| MCRs | HPDH-MCRcag | SEQ ID NO: 38 |
| | HPDH-MCRct | SEQ ID NO: 39 |
| | HPDH-MCRgb | SEQ ID NO: 40 |
| | HPDH-MCRot | SEQ ID NO: 41 |
| | HPDH-MCRrc | SEQ ID NO: 42 |
| | HPDH-MCRsl | SEQ ID NO: 43 |
| | HPDH-MCRca_variant_3 | SEQ ID NO: 44 |
| | HPDH-MCRca_variant_6 | SEQ ID NO: 45 |
| Genes encoding | BDHcm | SEQ ID NO: 46 |
| HPDHs | BDHkp | SEQ ID NO: 47 |
| | HBDHos | SEQ ID NO: 48 |
| | HBDHps | SEQ ID NO: 49 |
| | HIBADHas | SEQ ID NO: 50 |
| | HIBADHbc | SEQ ID NO: 51 |
| | HIBADHma | SEQ ID NO: 52 |
| | HIBADHpa | SEQ ID NO: 53 |
| | HIBADHxc | SEQ ID NO: 54 |
| | HPDHam | SEQ ID NO: 55 |
| | HPDHbs | SEQ ID NO: 56 |
| | HPDHca | SEQ ID NO: 57 |
| | HPDHcag | SEQ ID NO: 58 |
| | HPDHct | SEQ ID NO: 59 |
| | HPDHec | SEQ ID NO: 60 |
| | HPDHed | SEQ ID NO: 61 |
| | HPDHgb | SEQ ID NO: 62 |
| | HPDHhw | SEQ ID NO: 63 |
| | HPDHka | SEQ ID NO: 64 |
| | HPDHms | SEQ ID NO: 65 |
| | HPDHot | SEQ ID NO: 66 |
| | HPDHps | SEQ ID NO: 67 |
| | HPDHra | SEQ ID NO: 68 |
| | HPDHrc | SEQ ID NO: 69 |
| | HPDHsi | SEQ ID NO: 70 |
| | HPDHsl | SEQ ID NO: 71 |
| | HPDHsm | SEQ ID NO: 72 |
| | HPDHst | SEQ ID NO: 73 |

### Example 10: S. cerevisiae Shake Flask Cultivation Trials for 3-HP Production

[0135] Cultivation Conditions

[0136] Various different cultivation conditions were evaluated on a couple early testing strains to see how the various culture conditions affected the strain's ability to produce 3-HP. The S. cerevisiae VSK-128 (Δura3, Δhis3) strain expressed two plasmids where one of the plasmids contained either the HIBADHpa or the HPDHec gene and the second plasmid contained the MCRsa2 gene. Both strains behaved similarly during the cultivations and had very similar metabolite profiles.

[0137] Six different shake flask cultivation conditions were tested:

[0138] 1. Aerobic, batch process, high initial glucose (120 g/L). Another 100 g/L of glucose was added on Day 3.

[0139] 2. Anaerobic, batch process, high initial glucose (100 g/L). The flasks were sealed and the shaking was slower at 100 rpms.

[0140] 3. Aerobic, batch process, repeated glucose spiking. Initial glucose was 20 g/L, then 40 g/L was added every subsequent day.

[0141] 4. Aerobic, simulated fed-batch process, many initial glucose tablets. 5 tablets were initially added, another 5 tablets were added on Day 3. Varying amounts of Enzyme A solution (50-150 μl per day) were added each day.

[0142] 5. Aerobic, simulated fed-batch process, repeated spiking of glucose tablets. 1 tablet was initially added, 2 tablets were added on Days 1 and 2, 3 tablets were added on Days 3 and 4. Varying amounts of an Enzyme A solution (50-150 μl per day) were added each day.

[0143] 6. Aerobic, batch process, repeated galactose spiking. Initial galactose was 20 g/L, then 40 g/L was added every subsequent day.

[0144] For the simulated fed-batch cultivations, each tablet is thought to release 0.5 g of glucose (which equates to 20 g/L of glucose for our 25-mL culture volumes). The tablets essentially consist of glucose (i.e. starch) and an Enzyme A solution (i.e. amylase) allowing for the controlled slow release of glucose into the medium during the shake flask cultivations. It was hypothesized that glucose-limited fed-batch conditions may promote flux towards growth and subsequently to 3-HP production.

[0145] Cell Growth

[0146] All of the regular glucose based cultivations grew similarly and the galactose fed cultivation grew more slowly. On the other hand, the fed-batch conditions promoted more cell growth compared to the other cultivation conditions. In particular, the fed-batch (tablet spiking) conditions really promoted a lot of growth early in the cultivation.

[0147] 3-HP Production

[0148] For these cultivations, the majority of the growth had generally occurred by the end of Day 2 and the vast majority of 3-HP had also been produced by Day 2, thus indicating that growth and 3-HP production are linked to each other. The fed-batch (tablet spiking) cultivation condition produced the most 3-HP (˜0.85 g/L) and the galactose fed cultivations produced the least amount of 3-HP (˜0.12 g/L) and the other cultivation conditions all produced about 0.3 to 0.4 g/L of 3-HP. These results demonstrate that cultivation conditions can have a large effect on the 3-HP production levels (FIG. 5).

[0149] Glucose Consumption

[0150] Glucose was quickly consumed in all of the cultivation trials up until Days 2-3, then the glucose consumption rates decreased significantly (during days 4-5) along with growth and 3-HP production. For the fed-batch cultivations, glucose seems to have been consumed as quickly as it was being released from the tablets, suggesting that these cultivations were performed under glucose-limited conditions.

[0151] Glycerol, Acetate and Ethanol Accumulation

[0152] Glycerol accumulation was quite high for the glucose fed cultivations and was much lower for the galactose fed cultivations. Acetate accumulation was fairly similar amongst the different cultivation conditions but the fed-batch (many tablets) conditions produced much more acetate.

[0153] High amounts of ethanol accumulated for most of these shake flask cultivations, especially for the glucose batch cultivations and the glucose spiking cultivations. The fed-batch cultivations aimed to represent glucose limited conditions to reduce excess overflow metabolism to ethanol and this approach seems to have succeeded since ethanol accumulation was significantly lower in the fed-batch cultivations.

[0154] Cultivation of a More Established 3-HP Production Strain

[0155] An additional 3-HP production strain [(EutEec, HPDH-MCRca, ACC1sc_S1157A) and (HIBADHpa, MCRsa2)] was cultivated according to the most promising fed-batch (tablet spiking) cultivation conditions to check its performance.

[0156] Again, most of the growth had occurred by Day 3 and most of the 3-HP production had occurred by Day 3. 3-HP production exceeded 1.2 g/L with this strain under this cultivation condition, (FIG. 6).

[0157] Although specific embodiments of the present invention are described in detail, it will be apparent to those skilled in the art that the specific description is merely desirable exemplary embodiment and should not be construed as limiting the scope of the present invention. Therefore, the substantial scope of the present invention is defined by the accompanying claims and equivalent thereof.

### INDUSTRIAL APPLICABILITY

[0158] The use of the recombinant yeast and the method for preparing 3-HP of the present invention enables 3-HP production in a high concentration and a high yield at a low pH from a useful sugar such as glucose, thereby greatly contributing to economical production of 3-HP from biomass and its applied products.

### SEQUENCE LISTING FREE TEXT

[0159] Attached electronic file.

The application's sequence listing, which the Patent Office published only in electronic form, follows.

SEQUENCE LISTING (144 sequences)

SEQ ID NO: 1 - protein, 2248 aa, Kazachstania exigua
MSEENLFEDSSAKRQYEITDYSKKHKALAPHFVGLNTLDKVEESPLKDFVKSHGGHTVISKILIANNGIAAVKEIRSVRKWSYETFGDERTVQFVAMATPEDLQANSEYIRMADQYVEVPGGTNNNNYANVDLIVDVAERTDVDAVWAGWGHASENPHLPEKLAASKRKIIFIGPPGSAMRSLGDKISSTIVAQHAKVPCIPWSGTGIDKVHVDETSGLVSVDDDVYQQGCCQSPEDGLAKAKQIGFPVMIKASEGGGGKGIRQVEREEDFIALYHQAANEIPGSPIFIMKLAGKARHLEVQLLADQYGTNISLFGRDCSVQRRHQKIIEEAPVTIANNETFDKMANAAVRLGKLVGYVSAGTVEYLYSNEEKKYYFLELNPRLQVEHPTTEMVSGVNLPSAQLQIAMGIPMHRISDIRVLYGMNPHSATEIDFEFKTEEAKKTQRKPVPKGHCTACRITSEDPNEGFKPSGGSLHELNFRSSSNVWGYFSVGNNGGIHSFSDSQFGHIFAFGENRQMSRKHMVVALKELSIRGDFRTTVEYLIKLLETEDFEENTITTGWLDDLISHKMTAEKPDATLAVICGAATKAFIASESARMEYIAQLKRGQVPAKNLLETMFPVEFIHENKRYKFTVAKSADDSYTLFINGSKCEVRAVKLSDGGLLISVGGQSHTIYWKEEAQATRLSIDSMTTLLEVENDPTQLRTPSPGKLVKFLVENGDQIKVGQAYAEIEVMKMQMPLVSQENGVIQLLKQPGSTIAAGDIIAMLALDDPSKVKHALPFEGMLPELGSPMVEGTKPAYKFKSLVSTLENILKGYDNQVIMNASLQQLIEVLRDPRLPYSEWKLCVSALHSRLPMSLDEKLDQLVDRSSNRNAIFPAKQLNKMIEDAVREPGSDELLPTIVEPLLDITNRYANGLEAHEHSVFVKFLEEYYNVEKLFSSHGNREENVILKLRDENLDSLDKVVEIVLSHAKVSAKNTLILAILKHYQPICKMSSSVAHIFSKSLGHIVELESKSAAKVALQAREILIQGALPSVKERTEQIEHILRSSVTNTSYGDLAPKKSEPNLEILKDLIDSNYVVFDVLLPFLCHEDPVIATAAAQVYVRRAYRAYTVGEVKTPNIKDSSISPLIEWKFQLPSAAFSSIPQVKSKIGMNRAMSVSDLSYVVDNEHAPLRTGILVASEHLDDVDACLAQGLEAIPEHANTANGPAPDRSGNSSSLSNVANVCVSSTEGFESEKDILARVHEILDLNKSDLIKSSIRRITFMFGFADGTYPKYYTFNGPNYQENQTIRHIEPACAFQLELGRMSNFNIKPIFTENRNIHVYEAISKTSALDKRFFTRGIIRTGRIRDEISIQEYLTSEANKLMSDILDNLEIVDTSNSDLNHIFINFSAVFDVSPEDVEAAFGGFLERFGKRFLRLRVSAAEIRIIIQDPKTGAAVPLRALINNVSGYVVKSELYTEIKNDKGEWVFKSLGKPGSMHLRPIATPYPVKEWLQPKRYKAHLMGTTYLYDFPELFHQAAITTWEKYLSNSSAKELSSIKDRDDLFISHELIEDENGELTEVEREPGANTIGMVAFKVTMKTPEYPRGRQFVIVANDITFKIGSFGPQEDEFFNKVTEYARKRGIPRIYLAANSGARIGIAEELVPLFQVAWKDSKVPAKGFEYLYLSKEGMETLKSYSKQNSVITERVVEEGEERYVIKSIIGADDGLGVECLRGSGLIAGATSRAYQDIFTITLVTCRSVGIGAYLVRLGQRAIQIEGQPIILTGAPAINKVLGREVYSSNLQLGGTQIMYNNGVSHLTASDDLQAVEQIINWLSYVPAKRNMPVPILETEDKWDRAIDFRPTTNEQYDVRWLIQGRELDNGDFEYGMFDKGSFFETLSGWAKGVVVGRARLGGIPIGVIGVETRTIENVIPADPANPDSTETVVQEAGQVWYPNSAFKTAQAIQDFNHGEQLPLMILANWRGFSGGQRDMYNEVLKYGSFIVDALVDYKQPIFIYIPPTGELRGGSWVVVDPTINNDHMEMYADKDSRAGVLEPSGMVGIKYRREKLLSTITRLDSTYRELKEKLSDKLLSTEEHQKISIQLAEREKMLIPIYNQISVQFADLHDRSSRMLKKGVIKAELTWEESRRYFFWRLRRRLDEEYLLRRLDSQLTQASRLEKIARVRSWYPTSVDVENDKEVVTWIEENYETLEEKFKALKLESFALDLAKNIRNDHENSMKGLEEVVRMLSATDKERLNKIINPDDKK

SEQ ID NO: 2 - protein, 2243 aa, Candida humilis
MSEENLFEDAAAKRQYEITDYSTKHKTLASHFVGLNTLERVEESPLKDFVKSHGGHTVISKILIANNGIAAVKEIRSVRKWAYETFGDERTVQFVAMATPEDLQANSEYIRMADQYVEVPGGTNNNNYANVDLIVDVAERTDVDAVWAGWGHASENPHLPEKLAASKRKIIFIGPPGSAMRSLGDKISSTIVAQHAKVPCIPWSGTGVDTVHLDSETGLVSVDDDIYQKGCCSSPEDGLAKAKKIGFPVMIKASEGGGGKGIRQVEREEDFIALYHQAANEIPGSPIFIMKLAGKARHLEVQLLADQYGTNISLFGRDCSVQRRHQKIIEEAPVTIASNETFEKMASAAVRLGKLVGYVSAGTVEYLYSSEEKKYYFLELNPRLQVEHPTTEMVSGVNLPSAQLQIAMGIPMHRISDIRVLYGMNPHGATEIDFEFKTEEAKKTQRKPVPKGHCTACRITSEDPNEGFKPSGGSLHELNFRSSSNVWGYFSVGNNGGIHSFSDSQFGHIFAFGENRQMSRKHMVVALKELSIRGDFRTTVEYLIKLLETEDFEENTITTGWLDDLISHKMTAQKPDATLAVICGAATKAFIASESARKEYINQLKRGQVPPKGLLETMFPIEFIHENKRYKFTVAKSADDSYTLFINGSKCEVRAVKLSDGGLLISVGGQSHTIYWKEEAQATRLSIDSMTTLLEVENDPTQLRTPSPGKLVKFLVENGDQIKVGQPYAEIEVMKMQMPLVSQENGVIQLLKQPGSTIDAGDIIAMLALDDPSKVKHAMPFEGMLPELGSPMVEGTKPAYKFHSLVSTLENILKGYDNQVIMNASLQQLIEVLRDPRLPYSEWKLNVSALHTRLPLALDEKLDKLVERSANRSAIFPAKQLQKMIDDAVRDPQADPLLSSIVEPLLDITTRYANGLEAHEHSVFVKFLEEYYNVEKLFSEHGERAENVILKLRDENIDDLDKVVLIVLSHAKVSAKNTLILAILKHYQPICKMSSSVAHIFTKPLQHIVELESKPAAKVALQAREILIQGALPSVKERTEQIEHILRSSVTNTSYGDSSPKVSEPNMEILKDLIDSNYVVFDVLLPFLCHEDPVIATAAGQVYVRRAYRAYTVGEVKSHSITDSSMNPLIEWKFQLPSAAFSSIPQLKSKIGMNRAMSVSDLSYVVDSEHAPLRTGILVAAEHLDEVDASLAQGLEVIPEHSAPGNGPAPDRSGSSSSLSNIVNVCVASTEGFDSEKEILARVNEILELNKADLIKSSIRRITFMFGFPDGTYPKYYTFNGPNYQENQTIRHIEPACAFQLELGRMSNFNITPIFTDNRNIHVYEAVSKTSALDKRFFTRGIIRTGRIRDEISIQEYLTSEANKLMSDILDNLEIIDTSNSDLNHIFINFSAVFDVSPEDVEAAFGGFLERFGKRFLRLRVSAAEIRIIIQDPKTGAPVPLRALINNVSGYVVKSELYTEIKNAKGEWVFKSLGKPGSMHLRPIATPYPVKEWLQPKRYKAHLMGTTYVYDFPELFHQAAITTWQKYKTNSSQKDLTTMKERDDLFISHELIEDESGELTEVEREPGANSIGMVAFKVTMKTPEYPRGRQFVIVANDITYKIGSFGPQEDEFFNKVTEYARKRGIPRIYLAANSGARIGIAEELVPLYQVAWKDADVPAKGFEYIYLNKDEMETLKGHSKENSVITERIVEDGEERFVIKAIIGADDGLGVECLRGSGLIAGATSRAYQDIFTITLVTCRSVGIGAYLVRLGQRAIQIEGQPIILTGAPAINKVLGREVYSSNLQLGGTQIMYNNGVSHLTASDDLQAVEQIIKWLSYVPAKRNMPVPILENGDKWDRQIDYRPTVNEQYDVRWMIEGRELEDGRFEYGMFDKGSFFETLSGWAKGVVVGRARLGGIPIGVIGVETRTIENVIPADPANPDSTEAVVQEAGQVWYPNSAFKTAQAIKDFNHGEQLPLMILANWRGFSGGQRDMYNEVLKYGSFIVDSLVDYKQPIFIYIPPTGELRGGSWVVVDPTINADQMEMYADKDSRAGVLEPSGMVGIKYRREKLLATMTRLDTTYRELKEQLSDKTLTPAQHQEVSVKLAEREKFLLPIYTQVSVQFADLHDRSSRMVKKGVIRAELTWEESRRFFFWRLRRKLDEEYLVKRLDIELPHASRLEKLARLRSWYPASIDETKDRDVVTWIEENYNVFEEEFKALKLESFAQELAKSMRTDHDVTMRGLEEIARMLSKEDKERLLSALK

SEQ ID NO: 3 - DNA, 1443 bp, Artificial Sequence
  AADHab
atggaaattaacgaaaaagatttgaagttgattattgaaaacgtattggacaagttagaaagtgacaagagtgataaaaagatattcgattcttcattgaatattccatccagtggtcaagacggtatatttgaagaagtcaacgctgcagtagatgccgctgaagcagcccatttggaattaatgaaattgacattagaaaagagaagagaaataatcagatctataagaaagatcataatgtctaatttggaagaaatctcaaagttagctgtcgaagaaactacattcggtagagtagaagataagatcgaaaagaacagattggctgcattaaaaacaccaggtattgaagatttggaacctaccgcatactcagatgacaacggtatgactttgatggaaagagccgcttacggtgttataggttccataatcccaagtactaaccctacatcttcagttatcaataacggtatttccatgatagctggtggtaatagtgttgtctttaacccacatcctgcagccaaaagatccagttgtttcacaatctccttgattaatcaagcaatagttaaggccggtggtccacctaatgtcttgtgcgccattgctaacccaactatagattctgcacaaacattgatgaagcacccaaaaattaagttgttagtagttaccggtggtcctgcagtcgtaaagactgctatgaactctgataaaaaggttattgctgcaggtccaggtaacccaccttgtgttgtcgatgaaactgctgacttagttaaagcaggtagagatattgtcaatggtgctggttttgacaataacatagtttgtatctgcgaaaaggaaatattggccgtttctcaaatcgctgatcaattgaaggaagaaatgattaagaatggtgcccatgaattgaagggtgaacaaatcgaaaaggttacaaagttagtcattaccgatccaggtaaacctggtcacgaaggtgcaccaaataagaaatacgtcggtaaaaatgcttctgtaattgcaagagatataggtttagacatctcagaacaaacaaagatattgttgtgtgaagtagatagataccatcctttggtttggaccgaacaattgttaccagtaattccattggttagattcaataacgttgatgaagccatagactttgctgttcaatgtgaacataatttcagacactctgcttcaatccactctaaaaacattgcaacattgtcaagaatggccaagttgatgaactgctccttattcattaagaatggtccaaactacagtggtttaggttttggtggtgctggttacacctcattcactatagcaacccctactggtgaaggtttgactagagctagaacttttactagagaaagaagatgtgtattagttggttacttcagaattgtttga

SEQ ID NO: 4 - DNA, 1434 bp, Artificial Sequence
  AADHal
atggtagatcaaaccttaatagaacaaataacaagagccgtattgacccaaatgaaagctggtaaagacgccgccgtatccggtgacggtatttttgccacagttgatcaagctgtcgctgcagccagacaagcttatcaagaattgagattgttaaccttggaaaagagagaaactttgataagagctatcagagatgctgcattcgcaaatgccgctgtaattgcccaaatggctgttcaagaatccggtatgggtagagttgaagataagatcttgaagaaccaattagcagccagaaaaaccccaggtactgaagatttgacttctagagcttggtcaggagatcatggtttgacattagtagaaatggccccttacggtgttattggtgctataacaccaactacaaatccttctgaaaccgttatttgtaactcaatcggtatgattgctgcaggtaattccatagtttttagtccacaccctactgctcaaaatacatccttgaccactatcagattgttaaacgaagctattgtcaaagcaggtggtccagataatttgttaacagccgttgctgaacctagtatcgaagccgctaacgcaatgatgagacatccaggtattcaaatgttggttgctactggtggtcctgccgttgtcaaggctgtcttatcttcaggtaaaaaggcaattggtgcaggtgccggtaatccacctgccgtagttgatgaaactgcagacatagccaaagcagccaaggatatcgttgcaggttgttcattcgacaataacttgccatgcattgctgaaaaggaaattatagcagttggtagaatagccgatgaattgatctcctatttgcaaaagtacggtgcatacttaataagtggtagagacatagaaagattgatggaagtcgtattaacagaaagaaccgaagaaatggctccaggttgtgttggtaaacctagaagagtctacggtgtaaataaggattacattggtaaagacgccaagtttatattgtctaaaatcaacatacaagctccagatcatataagagttatcttatgcgaaacaccagctgaccaccctttcgtcttggaagaattaatgatgccagtattgcctttagtttcagtcagagatattgacgctgcaatagatttggcagtaaaagttgaacatggtaatagacacaccgctgtcatgcattctaagaacgtagactatatgactagattagctaaggcaatcgaaacaaccatattcgtaaagaatgcaccatcatacgccggtataggtgttggtggtgaaggttttactacttttactattgctggtcctactggtgaaggtttgacatccgcaagaagttttactagacaaagaagatgcgctttagttgatgcattctctattgtctga

SEQ ID NO: 5 - DNA, 1395 bp, Artificial Sequence
  AADHbs
atggatgaaataatgataaagaacatagtaagagaagtattgatgaaaactaatttggatatctcctgtaagagtgaccaaggtgtatttgaagatgttaatgacgcaattgatgctgcatatattgcccaaagagactggtatatgaactacaaggtcgaagatagaagaagaatcatcgaagctatcagagttgtcgctagagaaaatgcaccaatgttcgccaagatgattcatgaagaaaccggtatgggtagatacgaagataagatcactaagaacttggcagttatagataaaactccaggtgttgaatgtttggtcacagacgccatctctggtgactcaggtttaatgattgaagaacaagctccttttggtgttattggtgcaataactccatctacaaaccctacagaaaccatcattaataacacaatctcaatgataggtggtggtaatgcagtagttttcaacgttcatccaggtgctaaaaaggtctgtgcagtatgcttgcaaatcttgcacaagactatcgttgaaaacggtggtccagctaacttaataacaatgcaaagaaagcctgatatggaagccgttaataagttgacagcttcccctaagattagattaatggttggtaccggtggtatgggtatggttaacgcattgttgaagtctggtaaaaagacaattggtgctggtgcaggtaacccacctgtcgtagttgatgacaccgctgatttggacaaagccgcttccgaaatatatagaggtgccagtttcgataacaacttgttgtgtttggctgaaaaggaaactttcgtaatggacaatgttgctgatgaattgattagaaagatgtgtgcctgcggtgctcatttgataaccccacaagaaactgaacaattgttgaaagttattttcttggaaaaggacggtaaatactctgttaacaaaaagtgggtcggtaaagatgcttctttgatcttagaatcaataggtatcaaggatgcagacacaagattggtcttatgcgaagtaccacatgatcacccttttgttttggtcgaacaattaatgccaataatgcctatcgtcagatgtaaaactttcgaagattgcgtaaagtatgcagtcgtagccgaaaatggtaacagacataccgcctccatgttcagtaaaaatgttgatcacatgactagattcgctaaggaaatcgaaactacaatattcacaaagaacgcagccaccttggtaggcgttggtataggtggtgaaggtcacaccactatgactatcgcaggtcctacaggtgaaggtttaacctgtgccagatcttttactagaagaagaagatgtatgttggctgatggtggtttaagagttatttga

SEQ ID NO: 6 - DNA, 1455 bp, Artificial Sequence
  AADHbw
atggacgtcagacaacaagatgtagaaagaatcgtagtagaagtattgaaaaagatgatgagtgatcaaccaaccgctgctgccacaacagttgtcgctgcatccggttgtgattgcggtgactttggtttgttcgatagattggaagatgctgtccaagccgctgaagcagcccaaaagaaaattagtacagtagcaatgagagataagattatagctgcaataagaaaggctggtttggaaaatgccaaagcttttgcagaaattgcacataacgaaaccggtatgggtagagtctctgataagatcgctaagaatatcttggtatgcgaaagaactcctggtacagaatgcttatccccaatggcaattagtggtgacatgggtttgactttaatagaaaatgcaccttggggtgtaatcgcctctgttaccccttcaactaacccaaccgctactgttataaataacgccatctccatgattgctggtggtaatagtgttatctttgctccacatcctaacgctaagagagcatctcaaactgcaatccaagtattgaataaggctatcatagaagcaacaggtgttgccaacttgttagtcgctgtaaaagaacctaccattgaagttgcacaagaattattctcacacccaagaattaaattgttagtagttactggtggtgaagccgtcgtagcccaagctagaaaagttgctacaatgagattgattgccgctggtgcaggtaatccacctgttgtcgtagatgaaacagccaacattgctagagcagccagatctatatatgatggtgcctcattcgacaataacatcatctgtgctgacgaaaaggaaattatagcagttgattctattgccgaccaattaaaagctgaaatgaaggcaattggtgccgttgaaatatcattggaacaagcagatgccgtcgctagagttgtcttaagaaattaccctcaagttgaaggtggtaaagctccaaatcctaacccaaaatgggtcggtagagatgctgcattgatagcaaaggccgctggtattgatgttccagactcctgcagattgttaatcgttgatgtcaagagagacataaaccatgtctttgctagagtagaacaattgatgcctgtaattccattgttgagagcagccaacgttgatgaagctatcgaatgggcattgattttagaaagaggtttgtctcataccgctggtatgcactcaagaaatattgataacatggacaagatggcaagagccatgaacacttcattattcgttaaaaacggtcctcacttggctgcattaggtgctggtggtgaaggttggactacaatgacaatttccacaccaaccggtgaaggtgttacctgtgctagaagttttgtcagattaagaagatgttgcgtagttgataacttcagaatagtttga

SEQ ID NO: 7 - DNA, 1314 bp, Artificial Sequence
  AADHcs
atgaagtcctccatatactccagtgtttccgaagctgtaatggctgctagaggtgcttttaatagatacgccgatttgaccttgaatgaaagaaaagaaattatagaagctgtcaaggctgcagtaagaccaagaattacacaattggcagaaatgaccgccgctgaaactggtatgggtaacgttgcagataagatcgaaaagatcagattggccgtcgaaaagactccaggtgtagaagatttgattacagaagtaaacaccggagatcatggtatgactttgtatgaattatcagcatttggtgttgtctgtgccgttcacccatgtactaatccttgcgctacattgatttccaacaccatcggtattttagcagccggtaatgctgtagttcattgtccacaccctagagcagttagagtctctcaatacttaactggtatgatatctgatgctgttagagatgtttgcggtattgataacttggtcgtaactgttggtgaatccttaatgggtagtacaagagaaatcatgtcacatccagatgttgacttgattgtctgcactggtggttccggtcctttaagacaagccatgagtgctggtaaaaaggtcattggtgcaggtccagccaatcctgtagctatagttgatgaaacagcagacttggaaagagctgcaagagatattgttaaaggtgcttctttcgacaataacttaatgtgtacctccgaaaaatctattgtagccgttgaaaagatagctgatgaattgatctctcatttggaaagaaacggtgtttactacactagatcagcagaagaaatagatagattgtattgcaccgccgtaactgaagatttcgttatcaacaaaaagatggaaggtcaatctgctgatgttattttggacgccgctaagatcccacatagaaagggtattaagttgatcgtcgccgaaacagatagaacccaccctttcgctacattggaattgttgatgccattgttgcctttagttagagccagagattttgacgaagctttggaagcagccttagatatcgaacaaggtttcagacataccgctactattcactctgaatcagttgaaagaatgaatagagctgctaagaaattgcaaactgcagtctttgttaaaaatggtccatccttgttaggtattggttttgataaggaaggtcatacttcttttactatcggtacaattaccggtgaaggtactacatctgctagacactttgctagaagaagaagatgtactttaacatctggtttctcaattagatga

SEQ ID NO: 8 - DNA, 1458 bp, Artificial Sequence
  AADHho
atggcattgagagaagatagaatagcagaaatagtagaaagagttttagcaagattggatggtaacagtggttcctccgccgcacctcattctggttcaggtgctccagctgcaaccgcaggtggtgcctctttggatattcctagaggtactttaggtgtttatgctgatgcagacgccgctgtcaatgcagccagaagaggttttgctgcaaacgaagctttgccattaagaactagacaagcaatgatagatgccatgagaaaagttgctagagcacatatccctgaattggctagatatgcagttgccgaaacaggtttaggtagatacgaagataaattggcaaagaatgaattagttattgccaagacaccaggtcctgaaatattggctccagttgcatataccggtgacgatggtttgaccttaactgaaagagcaccatacggtgttataggtgcaatcactccatgtacaaatcctacagaaaccgttatttgcaacgcaataggcatgttgtccggtggtaatgccgttgtttttaatgttcatccaagtgccgctagagtctgtaattggttggtacacttgttaaacgaagcaattatgtccgtcggtggtccaagagatgctatcacctccgtagaaagtcctactattgacagtgcccaaaccttgatgactcatgctggtgttagattagtagttgtcactggtggtccaggtgtagttagagcagccatgaaatctggtaaaaaggttatcgctgcaggtcctggtaatccacctgctgtcgtagacgaaactgccaacttggctaaagccgctgcagccattataaagggtgcatcaatagataacaacatcatttgcacagctgaaaaagaaatagtagctgttgcttctattgctgacgaattaagtagattgttaggtcaaagaggtgctttggtattaggtgacgctcaagttagagcattggaaagagttgtcttagacggtgaacatgttaataaggaatgggtcggtaaagatgcctctagaatcgctgaacaaattggtttgagaggtcacggttcagatttgagattgttagtatgtccagttgacgaaggtcatccttttgtacaacacgaattgttaatgccagttattggtttagtcagagtatccgatgctactgaagctatggctacagcagttagagtcgaacatggtttttgccacacagctgttatgcattctacccacattgacagattgtcagctatggctagagtttgtaacgcatcaatattcgttaaaaatgattgcaacttagctggtttgggtttaggtggtgaaggttttacatctttcaccattgcatcaccaacaggtgaaggtttgactacagctagagatttcactagagttagaagatgtacattgaaggaatcttttagattcgtctga

SEQ ID NO: 9 - DNA, 1404 bp, Artificial Sequence
  AADHhs
atgaaaatcaaagaaaacgaattggataaaatagtcaaccaagtaatcagttccttaaacaacaagcaaaacagtaacgacttcaacactaagatcaattacggtattttctctacaatggatgaagcaattgccgaagctgttaaagcacaagcctgtttgcaattaaattactccactgaagctagagaaaagattattaaatctattagaaagaatgtttctaagcatgttgaaaagatttctgaaatggcagttgaagaaacagatatgggtagaatcgaagataagatcattaagaataacttggctattaataagactccaggtacagaagatttgagaaccgaagcctttagtggtaaaaagggtttgactattgtcgaagaagctcctttcggtgtaatctgttctattgcaccagttactaatcctaccgaaactataatctctaacgccatatcaatgatcgcttcctgcaatggtgttgtctttaacagtcacccaggtgctaaaaaggtttctaagtacataatcgaagtcttgaataaggttattatggaagccggtggtccagaaaatttgttaaccgctgtcaacgaacctaccttgcaaactgtagaatcttgtatgagagatgacagaattgcaatgatagttgccacaggtggtccaggtgtagttaatgctgcattatcttcaggtaaaaaggctattggtgctggtgcaggtaacccacctgtcttggtagatgacacagttgatttgaagagagttgccaaagacatcattaatggtgcttcattcgataacaacttaccttgcacttccgaaaaggccattgttgctttggaaagtatagctgattctttgttaaacgaaatgacaaaccaaaacgcacaattagttcatgacatcaaagccttggaaagagtcattttgaacgatgacggtagtataaacaaggcattggttggtaaagatgccgctttcattttgaataaggctggtttaaaggcaaagtctgaagatttgagattagttattgtcgatgtagacttaagacacccatttgtccaaaaggaacaattgatgccagttattcctttagtcagagctaaaaatttcaacgaagcaatggaaatgggtgttgatattgaagaaggtaatagacatacagctatcatccactcaaagaatgtagataacttgaccaagttcgctaagaaaattgaaactacaatctatgttaaaaacgccccatcctacgctggtattggtgcaggtggtgaaggttacgcaacattcaccatagccggtcctacaggtgaaggtttaacctccgctagaagttttactagaaaaagaagatgcgttttggtcgatggtttctcaattatatga

SEQ ID NO: 10 - DNA, 1398 bp, Artificial Sequence
  AADHma1
atgcaaaccgatgctcaacaaatagaaagtatagttagaagagtcatagaacaattacattccccacaaagagatggtgaaagttacggtgtctttagaaccttggatgacgcagtagccggtgctcaaggtgcttacaaaaagataagaactatggctcaaagagaagcaattatagctgcaatcagaagaactggtagtgaaaatgttcaagcattgtctgaattagccgtccaagaaacaggtttcggtagagtagaagataagatcagaaagcatagattggttttagacaaaactcctggtatcgaagctattgttccaatggcagtcacaggagatcatggtttgtctttaattgaaaatgctccttggggtgtaatagcatccgttacccctagtactaacccatctgctactatcttgaacaacgcaatatcaatgatcgccgctggtaattcagttgtcttttccccacatcctgcagccagagctgtctcccaaagaacaatccaattgataaatagagcctctgtttcagctggtggtcctgcaaacttagtcacctgtgtagaagaaccaacaattgaagctgcaaccagattgttttcattccctggtatacaattgttaaccatcactggtggtgaaggtgtagttaatgccgctagaaaagttactgataagagattaatcgcagccggtccaggtaacccacctgtcgtagttgatgaaacagctgacattgaaagagctgcaatttcaatagttcaaggtgcatccttcgataacaacatcatatgtgttgacgaaaaggaaataatcgccgtcgaatccattgctactgaattgaaaactgctatgtgcagacatggtgctgctgaaattaatgcagatcaagcagacgccgtcgctagattggtattagctggttacccaggtcctaacccacaccctaaaccagaatgggttggtagagatgctgaaaagattgcagccgctgcaggttttagtgtacctgcaggtactagattgttagttacagaaaccgaaagagatcatgcattcgccactacagaaatgatgttgccagttatctctttgataagagctagagatgcagaccaagccattgattgggcagttgaattggaagccggtaatagacatacagccgctatgcactcaagaaatatcgacaacttgtccagaatgggtttagaaattaattgttctttgttcgttaaaaacggtccttgcttggccggtttaggtgctggtggtgaaggttggacaagtatgaccatatctactccaacaggtgaaggtgtaaccaacgctagtactttcgttagaaagagaagatgcacaatggttgattctttcagaattgtctga

SEQ ID NO: 11 - DNA, 1422 bp, Artificial Sequence
  AADHma2
atggcctttaatgaagatttgattgcctccatagtagaacaagttttgaaggaaatacaagatgatgaccacgttatcgcctccgctagacaatccgttgtcaaagcaaatgataactggggtgtctatactgatgtagacgaagctatggaagtagttaataaggcacaaaaggaatttgctgcaatgccaatatccaagagagatgaaattataagtgctatcagaacagcaggtgttgaaaacgctgaacatttggcaagaattgcccacgaagttaccggttatggtagaatcgaagataagactgttaagaatagaaacgccgctatgttaactccaggtatagaagatttgcaaaaggaatttttgtctggtgacggtggttcagtcattgtagaatacggtcctatgggtgttatagcttccttgatgccaagtacccatcctactgcatttgttataaatcacgctatcgcaatgttagcagccggtaacgcaatattcatctgtccacatcctaaagcccaagctgcaacattggaagctatgaaggcattgaataaggccattgttgaagctggtggtccaaaatacttgatggttgcagtcgataaggccgacatggaaacctccaacaaagtttatgcacatccttacgttaagatggtcgccgctgcaggtggtgaaggtgttatcagagccgctttaaaaagtggtaaaaaggctattaccggtggtccaggtaatccacctgtcgtagttgatgaaactgctgatattgctaaagcagccaaggatatcattgacggtgaatcttacgataacaacgttttgtgcatagcagaaaaggaagtctttgtcgtagaatcagttgttgatagattgattgctgaaatgcaaaagaataacgcttacttgatcaagggtcaagatgtagctaatttgacaggtgttaccattaaagacggtaaaccaaatggtcaattggtcggtaaaaacccttctgtaattttgaaggaaataggtatcgaagttggtgacgatgttagaactgttatatttgaagctccacctgaacatccattggtaatgatcgaacaattgatgccagttttgcctatagtaagagttaaggatttcgacgaagccgttaaatgggcagtcaaggccgaacatggtgacggtcacacagctatattgcattctaacaacatcaacagaattacagaatatgccagagctatgcaagtcaccgtattagtagttaacgcaccatcttattcatgtatggacccacaatcaaaaactttggtttacgctcacactttaacaggtccaacaggtgaaggtttttgcactcctagacatttcacaagacaagaaagaattgtcttaggtggtgcttttcacttcgtttga

SEQ ID NO: 12 - DNA, 1437 bp, Artificial Sequence
  AADHmm
atggaccaaaaggaaattgaaaacgtagtaaaagccgtcttagcctctatgagtgcaggtacacaaccagcagccgcaagtgccgcaccacaacaagctgcagcctcccaaaataacggttttggtgtattcgaaagtttggatgacgctgttttagctgcaaaagaagcacaaaaatccttgaaaactgttgaaatgagaaatttgtgtatcggtgctatcagaagagccgctaccgaacatgcaagagaattggctgttttagcagtcgaagaaacaggcatgggtagagttgaagataaattggctaaaaatttggcccaagctaacggtactccaggtgtagaatgtttaagaccagaagttttaacaggagatcatggtttgaccttaatagaaaatgcagcctggggtgttattgcttctgtaactccatcaacaaaccctgctgcaacagccatcaataacgctatctctatgattgctggtggtaattcagtcatttttgcaccacaccctgccgctaaaaaggtttctcaaagaacaatcaccatcttgaatgaagctattgttgcagccggtggtccaaataacttgttagtcactgtagccaaacctgatatcgaaacagctcaaagattattcaagtatccaggtataggtttgttagttgtcactggtggtgacgctgtagttgaatccgcaagaaagcatacaaataagagattgattgctgcaggtgctggtaacccacctgtcgtagttgatgaaacagcagacatcgaaagagccgctaaagccattgttcacggtgctagtttcgataacaacatcatctgtgctgacgaaaaagttttgatcgcagtcgattgcattgccgacaagttgatcacagaaatgcaaagaaaccatgcagttttgttgaccagagaacaatctgaaaagttgatccctgtattgttaaagaacgttgatgaaaccggtcacggtactgtctcaagagattgggttggtagagatgctgccaaaatagctgcagccatcggtatgactgttccagcagatacaagattgttaattgccgaaaccgactgtaagcatccttttgctgtcactgaattgatgatgccagtattgcctatcataagagtaaaggatgttgaccaagcaatagatttggccgttaagttagaaggtggttgtcatcacactgctgcaatgcactccaacaacatcagtaatttgaacagaatggcaaacgccattgatacatctatattcgttaaaaacggtccatgcatagctggtttgggtttaggtggtgaaggttggactacaatgaccatcaccactcctactggtgaaggtgttacatgtgcaagaacctttgtcagattaagaagatgcactatggttgattcattcagaattgtctga

SEQ ID NO: 13 - DNA, 1434 bp, Artificial Sequence
  AADHpa
atggaaatacaaaacttagaagaagatatcagaagaattttatcagaagaattgaagaagagtggtacctcacaaaccgcctcaacctctgatgccggtcaaaatggtatattcaagactgtagatgaagctatcgcagcagctaaagctgcagaagatgtttacattgataaaactttagcctttagagaaaaggtcttgactgcaattagagaaggtttcagaccttatatagaaaagatggcaaaagatatcaaagatgaaactggtatgggtacagttgaagcaaaaatcgctaagttgaataacgccttgtacaatacccctggtactgaaattttgcaacctgaagctgaaacaggtgacggtggtttggttatgtatgaatatgctccttttggtgttatcggtgcagttggtcctagtacaaatcctagtgaaacagttatcgccaacgctattatgatgttggccggtggtaatacattatattttggtgcacacccaggtgccaagaaaatcactagatggaccatagaaaaattgaacgaattggtttatgaagctaccggtatgaaaaacttagttgtctccatcgaagaaccatccatcgaatccgttcaagaaatgatgcaacatccagatatcgctatgttgtcaatcacaggtggtccagcagtcgttcatcaagccttggtttcaggtaaaaaggccgttggtgcaggtgccggtaatccacctgctattgttgatgctacagcaaatgttgctttggcagcccataacattgttgattcagcctcctttgacaataacatattgtgcacagctgaaaaggaagttgtcgttgaaagttccgttaaagacgaattgattaagaaaatgcaagaagaaggtgctttcttggttactaatgcatccgacattgataagttggccgaaatgacaatcggtaaaaatggtgcacctgacagacaatttgtcggtaaagatgcaacctatatattggacaaggcaggtattgcttacactggtacaccaaagttaatcattttggaagcccaaaaagaccatcctttggttactacagaaatgttgatgcctattgttccagtcgtatcctgtcctacatttgaccaagtcttagcaacagccgtagaagttgaacaaggtttgcatcacacagcatcaatccactccgaaaacttgcctaatatcaatagagcagcccacagaatgaatacatctatcttcgtcgttaacggtgccacatacgttggtacaggtgttggtgctaacggtgcacatgctggtgcatctgcattgactatcgccacaccaacaggtgaaggtacagcaaccgctaaaacctttacaagaagaagaagattgaacagtccagaagcctttagtttgagaagttgggaagcctga

SEQ ID NO: 14 - DNA, 1434 bp, Artificial Sequence
  AADHpb
atgcaaactacagaagccactatcagaaacgtcgtccaagaagtattagcacaattagccaagcaatcaaatggttcaaacggtgttccaagagcagaaagaaaagccggtgactggggtgttttcgatgacactgaccaagccattgctgcagccaatgaaggttttagagctttatcttctaagggtatggaagaaagagcaaagatcgtagaaatcgttaagagaatctgtgctgatcaagcagaagaattgggtagattggaatttcaagaaaccaaagtcggtagattggaccataagatcgaaaagttgcaaattattaagaaagtaccaggtacagaatggttgagaaccgaagctatgtccggagatcatggtttgacagttattgaatatgcaccttttggtgtaatcggtacaattaccccagttactcacagtttgcctacattagctggtaatgttataaacatggtcgctgcaggtaatactttggttgtcaacccacatccttctggtaaaaagattgcctgtgaaggtgttagaagattcaatagagctatatacgccgctacaggtttggaaaatgtaataaccatcgtttccaacccaactttagaaagtgctgatagaatttttaaccatagagatgttaagatgttatgcgtaactggtggtccaggtgttgctagagcagctatggcttctagaaagaaagccgtagttgctggtcctggtaatccacctgttttggtcgatgaatccgcttgtttacaaaacgctgcagaaagtatcattgccggtgctggttatgacaacaacttgttgtgcataggtgaaaaggaagtattcgtcgtagaatccgtttttgatagattcatgcaagaaatggacaaggcaggtgccgttagattgaatgcatctcaagtcgatcaattatcaaaagtagcctttacaccacctgaaaacgaaaaggatcattaccacgttaacagagacttggtcggtcaacatccatacgttttagctaaacaaatcggtttgccattacctgaatcaacaccattgttatttggtgaaaccgatgaacacaatcctttcgtcgctgaagaacaaatgatgccatttgtccctatagtaagatgtagaaacgcagaacatggtatggatttgtgcgaaaagtatgaacatggtttcagacacacttctttaatccactcaagaaacgttagaaacatgtctatcatgggtaaaagaatggatactacattgtttatcaagaatggtccatcacctgccggtttgggtttaggtggtgaaggttacttatccttcagtattgcaactccaacaggtgaaggtgttaccactcctttgacctttactagacaaagaagatgtacaatggttgatgacttaagaattgtctga

SEQ ID NO: 15 - DNA, 1359 bp, Artificial Sequence
  AADHpe
atggaaatcaaagaaatggtcgccttagccagaaaagcccaaaaagaatatcaagcaacacataatcaacaatcagtagacaacatatgtagagctgcagccaaagttatatatgaaaacgctgaaatgttggcaagagaagccgttgacgaaactggtatgggtgtttatgaagataaagtctccaagaatagaggtaaatctaagggtgtttggtacaacttgcatgacaaaaagtctgtcggtatattaaacattgatgaaagaaccggtatgatcgaaattgccaaacctatgggtgttgtcggtgctgtcaccccaactacaaatcctatagtaactccaatgtctaacatcatcttcgccttgaaaacttgtaacgctatcatcatctcaccacatcctagatctaaaaagtgctcaaaacacgcagttgatttgatcttagaagccattaagcctttcaacgtcccagagggtatggttcaagtcatagaagaaccttccatcgaaatgacacaacaattaatgggtgcagtagatgtagttgtcgcaaccggtggtatggctatggttaaatctgcttattcttcaggtaaaccatcatacggtgttggtgctggtaacgtacaagttattttcgattctgacatagatttcgaagatgctgcagaaaaagttatatatggtagatcctacgataatggtatcatatgtactggtgaacaatctgttatatataacgaagccgacaaagatgctgtttttgccgctttaagaaagagaggtgcatacatttgcacagaagaagaaggtaaaaagatgagagacttgttgttccaaaatggtggtcctattaacaaagatgtagttggtcaaggtgtccaaaagattgctaagatggcaggtattaatgtaccagaaggttctagagtcataatcgtagaagcaaacggtgtaggtgaagaagatgttatctgtagagaaaagatgtgtccagttatgtgcgctttgtcatacaagcatttcgaagaaggtgttgatatcgcatgtagaaatttggccaacgagggtaatggtcattcctgcgctatacacagtaacaaccaagcacatatcatcttgactggttctaaagctacagtttcaagaattgtcgtaaatgccccttcagctaccactgcaggtggtcacatacaaaacggtttgaatgttacaaacaccttaggttgcggttcctggggtaacaactccatcagtgaaaacttcacatacaagcacttgatgaacattagtagaatagctccattgaaccctgctattaaagttccaaacgatcaagaaatctgggaattatga

SEQ ID NO: 16 - DNA, 1383 bp, Artificial Sequence
  AADHrw
atgaccgttaccgctacattggacgcagatttggcagcattggcagacgttagagcacaagtatccgcaactaagaaggcatttgacgccatcgaaggtgctgatcaacaatggttggacgaaattgttagagctatggctaaagcaggttatgatgcttctgaagaattagccagaatggctgtagacgaaacaggttatggtgtttacgaaaataagattattaaaaatagattcaataccggtttcgttgctgattggatgttggaaagaagagccgtaggtgttttatgggctgacgaagaaaacaaggttactgcagtcggttctccaatgggtgtcatagctgcaatcattccagtaacaaatcctactgccacagttttgtttaaatccttggcaagtgttaaggctggtaacgccgttgtccatgctccacaccctagagccgctagatgttctgcaagagcagccgaaattatggccgaagctgcagtccatgccggtgctccagaaaatttggtttcatgcttaagacaacctacattggatgctaccagagaattaatgagacacggtgacattagattggttttagctactggtggtccagcaatggttgccgctgcatattcttcaggtaaaccaaccatagctgttggtgctggtaatgtccctgcttacgtagattccactgttaaagacttggccgaaaccgctactatgatagttacatccaagagtttcgataacggtaccgcatgtgttgccgaacaaagtgtagttatcgccgctccagttgctgatcaattggtccaagaattaggtagagcaggtgccacctggatgactaaagatcaacaagcagccttgacaagaaccttatttgacgaaagaggtggtttgagagctaatgcagtaggtcaatctgcagttagattagccgaaatgtccggtttcactgtccctgctagtacaaaggtattggctgcagaattagatgaagtcggtgaccatgtattgttatcaagagaaatcttgggtccagtattgactgtttacagagaacctgattaccaagcaggttggagaagatgtagagaaattttggctttaggtggtgaaggtcataccgtcgcagtacacacttccgatccagaagtcgtagctaaatttggtgaattgccagcaggtagaattgttgtcaatactcctgctttatttggtggtatgggttactctacaaacgttgatccttcattccaaattggtactggtacatggtctggttcaatatgctcagacaatgttacaccattgcatttggtcaacataaagagaatcgctcacgaagcaagaccttggagaggtgttttcgattga

SEQ ID NO: 17 - DNA, 2616 bp, Artificial Sequence
  AADHsl
atggctattgaagaacactcattgaacgacaaggaatccaagaaagaaaccttagaagaaaccattgacttattagtaacaaacgctaaaacagcttctgaagagtttactccattggatcaacaacaaatagacgaaatcgttagacaaatggcattggccggtttagatcaacatatgcaattggcaaagatggccgtcgaagaaacaaagagaggtgtatacgaagataagatgattaagaatatatttgctacagaatacatctataactctattaagaaaaataagaccgtaggtgttatttcagaagatccatacgaagaaatcgttcaaattgcagaacctataggtgttattgctggtgtcacccctgtaactaacccaacatctactacaatgttcaagtccttgattagtataaagactaaaaaccctataatctttgccttccatccatccgctcaaaagtgtagtgctgcagccgctaaagttgtcagagatgcagccgttaaggctggtgctcctaaaaattgcattcaatggatagaaactccttcattggaagcaacacaaagattaatgcatcacccaggtgtatctttgattttagctacaggtggttcaggcatggttaaggctgcatattcttcaggtaaacctgcaattggtgtaggtcctggtaatgttccagcctacatagaaaagtctgcagatgttaaacaagccgtcaacgacttgatcttgtccaaaactttcgataacggtatgatctgtgctagtgaacaagcagtcatcgtagaccaacaaatctatgaagctgttaaaaaggaaatgattgataataagtgttacttcttgaacaacgaagaaaagaagaaagttgaaaagttagttattgatgaaagaagatgcgcagtcaacccacaaattgtaggtaaaactgctgcttttattgctggtttggcaggtgttacagtccctgaagataccaaagtaattgttgctgaattgtccagtgttggtccagaatctcctttatcaagagaaaaattgtcaccagtcttagcctgttttagagctaagaccactgaagaaggtttcaaaagatgcgaagaaatgttagcatttggtggtattggtcattctgccgtaatacactcaaacgatcaaaaagttatagacgccttcgctatgagaatgaaggctggtagattgatcgttaatgcaccatcttcattaggtggtatcggtgacatctataaccattttattccttccttgaccttaggttgtggtagttacggtggtaattccgtcagtaccaacgtaggtactgctaatttgatcaacatcaagactttggcaaacagaagaaacaacatgcaatggttcaaggttccacctaaaatctatttcgaaaagaacgctaccaaatacttgtctgttatgccagatataactagagcttttattgtagccgaccctggtatggttaaattcggttatgttgacagagtcattcatttcttgaagcaaagaagagatccagttcactacgaagttttctctgatgttgaaccagacccttcagtagctactgttatgaagggtacagaattgatgagaaaatttgaaccagacgttatcattgctttaggtggtggttctgcaatggatgcagccaagggcatgtggttgttctatgaatcacctgaaacagatttctttggtttgaagcaaaagttcttggacataagaaagagagtctttaaattcccagatttgggtaaaaaggctaaattcgtagcaatccctacaacctccggtaccggtagtgaagttacttctttttcagtcataactgataaggaaaacgacatgaagtacccattggccgactacgctttaactcctaacgttgcaataattgatccagaatttgtcttgacagtacctcaaagagtcttagctgattccggtatggacgtattgactcatgcaattgaagcctacgtttctaacatggctaacgatttcacagacggtttatgtatcaaggcaatccaattggtttttaaatatttgccaagatcttacaaggattcaaccgacagagaagccaaggaaaagatgcacaatgcttccactatcgctggtatggctttttctaatgccttcttgggtattaaccattctttggctcacaaattgggtaatgaatttcatttggcccacggtagatgttgcgctatcttgttgcctcatgttataagattcaacgctcaaaagccaacaaaatttgctgcattccctaagtacaagcactttattgctgatgaaagatacgccgaaatagctcaagttttgggtatcgcaggtaaaactacagaagaatctgttgaaaatttggtccaagctattaagaaattgactcaagaattaaacatgccaatgtccatcgaaaagaacggtgttagtaaagaagctttcgaagccgctgtcgataaattagcagacagagcctttggtgaccaatgcacaccagcaaaccctaagatgccattggtttcagaattaaccgaaatctatagacaagcttttaaaggtatttga

SEQ ID NO: 18 - DNA, 1389 bp, Artificial Sequence
  AADHss
atggcagatgaacaattagtccaaaatgtagtaagagaagtagtagcaagaatgcaaatatccgctccagcaagaggtatgcacggtgttttctctgatatggaagaagcaattgaagctgcaagaactgcccaacaaacagttagattgttaccaatggaccaaagagaaaagattatcggtgccataagaagaaaaactagagaaaacgctgaaatcttggcaagaatggccgtaaatgaaacaggcatgggtaacgttggtgacaaaattttgaagcatttgttagtcgccgataaagtaccaggtaccgaagatatctctactagagctttttcaggtgacagaggtttgactttaattgaaatgggtcctttcggtgtaatcggtgctattaccccatgtactaatccttccgaaacagttttatgcaacaccatcggcatgttggcaggtggtaatacagttgtctttaacccacatcctcaagccataaagactacattattcaccatccaaatggttaatgaagcttcattggaagcaggtggtccagataacatagcttgtacagttgacgcccctacattagctacctctgaaatcatgatgaagtcaccacacatcaagttgttagtcgcaaccggtggtcctggtgtagttactgctgtattatcttcaggtaaaagagcaattggtgccggtgctggtaatccacctgccttggtcgatgaaaccgctgacatcagaaaggccgctgaagatatagttaacggttgtactttcgacaacaacttaccatgtattgctgaaaaggaaattgtcgcagtagattctattgccgacgaattgttgcattacatgttgactgaacaaggttgttaccaagcttcagaagaagaattggatagattaacaaaggcagttatggacgaaaagggtagattgaatagaaaagctgtcggtagatccgcaagaaagttgttaagtatgatcggtgttgaagtcgatgctaacataagatgcatcactttctttggtccaaaggaacaccctttgataaccactgaattaatgatgccaatcttgggtatcgtaagagttaaggattttgcagaaggtttagaaacagcagcctggttggaacatggtaataagcactccgctcatatccacagtaaaaacgttgatagaatcacagaatacgcaagaagattagacacaaccattaccgttaagaatggtccttcttatgctgcattgggttttggtggtgaatcttactgtactttcacaatagcatcaagaactggtgaaggtttaacatccgccagaagtttcatcaaatccagacattgtgttatgactgatagtttgtgcgtcagatga

SEQ ID NO: 19 - DNA, 1404 bp, Artificial Sequence
  AADHta
atgaataacactgaattagaatccttgataagaaccattttgaccgaacaattaacaccatccgctactgatacccctgcctgcactgcctcttcagtcgctttatttgatgacgtagattctgctatttgtgctgcacatgccgctttcttaagatatcaagaagcaccattgaaaactagatctgccattatagcagccattagagcagaaatagccccttgcttatcagaattggcagaaagagctgcagccgaaactggtatgggtaacacagctgataagatcttgaaaaataaggctgcattggaaaacacaccaggtattgaagatttgaaaactacagctttgaccggtgacgaaggcatggttttgttcgaatactctcctttcggtgttgtcggtgcagtcgccccatcaacaaaccctactgaaacaatcattaataactccatcagtatgttggccgctggtaatgctatctatttttccccacatcctggtgcaaagaacatcagtttgtggttgatccaaaagatggaagaaatcgcttttaaagtttgtggtatccataacttgattgtcaccgtaaaggaaccaacattcgaagctacccaacaaatgatggcacacgataaaattgctttgttagcaataactggtggtcctggtatagttaacatgggtttaaagtctggtaaaaaggtcataggtgctggtgcaggtaacccaccttgcttggttgacgaaactgcagaaattgtcaaggcagcccaagatatagtagccggtgcttcctttgactacaatttgccatgtattgctgaaaaatctgttattgctgttgattgcattgccgaccaattgatacaacaaatgagagaatttggtgccatgcaaatcacagatccacaacaaattgctcaattaagagaagtctgtattcaaaaaggtgctgcaaataagtccttagtaggtaaaagtccagctaccatattggccgctgcaggtatcccatgccctgcaaaggaacctagattaataatcttggaagttccagctaacgatcctttcgtagttactgaacaattaatgccagttttgcctattgttagagtcgataacttcgaacaaggtttgcaattagctttgaaagttgaagatggtttgcatcacactgcaatgatgcattctcaaaatgtttcaagattaaacaaggccgctcacttgatgcaaacatctatattcgttaaaaatggtccatcatacgccggtatcggtgttggtgctgaaggttttaccactttcacaatagcaacccctactggtgaaggtacaacctccgccagaacctttggtagattaagaagatgtgttttgactaacggtttctcaattagatga

SEQ ID NO: 20 - DNA, 1425 bp, Artificial Sequence
  AADHtl
atggtagacatagacttaaagaacgtagaacaaatcgtcagaactgtattagcctcaatgcaaactcaacctcaagccgtccaacctgctgcaggtagaagagccgctccaggtgtttttactgaattggatgacgccgttgctgaagcatctacagcacaaagagccattagaaatttggctaccagagttaaagttgtcgaagcaataagaaaggcagccgaagcccatgctagagaattggctgaattagcagtcgccgaaacaggcatgggtagagtagaagataaattcgccaagaacgtttcacaagctagacacacaccaggtgttgaatgtttggctcctaccgcattaactggtgacagaggtttgaccttaattgaaaatgctgcatggggtgtcatagcttccgtaacaccaagtaccaaccctgccgctaccattattaacaacgcaatttctatgatctcagccggtaatactgtagtttttgctccacatcctgcagccaaaaaggtttctcaaagaactgtctcattgttaaacgaagcatccgttgctgcaggtggtccagataatgtcgtaactacagttttgaaccctgatattgctacagcacaaagattattcagttatccaggtattcatttgttaacagttaccggtggtgaagctgttgtcgaagccgctagaaaacacactgataagagattgatcgcagccggtgcaggtaatccacctgtagttgtcgatgaaacagccgacttagctagagctgcaagagatatagtttggggtgcttccttcgataacaacatcatctgtgttgacgaaaaggaaatcatcgtagttgatagagtctgcgacgcattgaaaactgaaatggcaagacataaggccgttgaattgacaccagatcaaggtaaaagattagttgacgtcttgttgaactatgttggtgctgatggtagaggtactgtatctagagattgggttggtagagatgctgctaagatcgcagccgctattggtttggaagttccagctgataccagattgttatacattgaaactccagctgaccaccctttcgcagtcacagaattaatgatgccagtaatacctgttgttagagcaccagatgttgatgcagccattgatttggcagtaaagttagaaggcaactgtagacataccgctgcaatgcactctagaaacattgatgctttagacagaatggccaacgctataaacacatcaatcttcgttaagaatggtccatgcttggcaggtttaggtttcggtggtgaaggttggaccactatgactatttccactcctacaggtgaaggtgttacttctgctagaacatttgtcagattgagaagatgcgtattagttgatcatttcagaattgtttga

SEQ ID NO: 21 - DNA, 2739 bp, Artificial Sequence
  AADHtm
atggatacagccgtagccgttcaaaaacaagatattgccatgtctgccgccagtaagcctaagtctgcctcaggtcctcctttcgatgtccaagcacatgtagatggtttagttgcaagagccattagagctttagcagaatttcaagctttggatcaagaacaagttgatagaatagtagccaaggcttcagttgctgcattaaatcaacacggtgttttggcaaaattagccgtcgaagaaacaggtagaggtttgtttgaagataaagcagtcaagaacatgttcgcctgtgaaaacgtaacatctgcaatgaagagaatgaaaactgtaggtgttattcatagagataacttgaacggtatagtagaaatagctgaaccagttggtgttgtcgccgctgtaactcctgttacaaacccaaccagtactgcaatttttaaggccttggtttgtttaaaaactagaaaccctatcgtctttggtttccatccacacgctcaaaagtgctctgcagaagccgtcagaattgtaagagatgcagccgtcgctgcaggtgctccaaccaactgtgcacaatggatagaagttccttcaatcaaagctactggtgcattaatgaatcacccagatatctccgtaattttggccaccggtggtgacgctatggttaaggccgcttattcatgcggtaaacctgctattggtgttggtcctggtaacgttccagcatttgtcgaaaagactgccgatgttgctagagcagcctatgacttggtcttatctaaatcattcgattatggtatggtctgtgcatcagaacaagctgcaattatagaagccccagtatacgaccaagctatggcagaaatgcaaagattacatgcacacgttgccacttctgatgaaaagagaaagttggaagaattagcatttggtgtagttgccaacagtgaaaattgcggttctgctaagttgaacccagcaatcgttggtaaatccgctagttggttggctaaacaagcaggtttcagtgttcctcaagatacatctatcttgttagtagaagcagatcatgttggttatgacgaaccattgaccagagaaaagttgtgtcctatcttggctgttattagagccagagatgctgatgacggtatcagattatctgaacaaatggttgaacaagacggtttgggtcattcagcatgcattcactccactgatgaagaagtcatcgaaaagttcggtagaagaattaaagctgtaagaatcataactaactctccaacatcattaggtggtataggtgacatctataatgctttcgttccttcattgacattaggttgtggtacctacggtaaaaattctgtttctaacaacgttcaagctgtcaacttgattaatgtcaagagaatcggtcatagaaacaacaacatacaatggtttaaagttcctgctaagatctatttcgaaccaaacgccatcagatacttagctgacatgagaagagtaaacagagtttttatcgtcaccgatgctactatgtcaaaattgggtgtcgtagatagaattagagatgttttgaacagaagattaaacatggttaccatgcaagttgtcgatactatagactctgaaccatccatcagtatggtcgaagtaggtgctgaacaaatgagaaatttccaacctgacacaattgttgctttaggtggtggttctgcaatggatgccgctaaggtcatgtggttgttatatgaacacccagaagtctctttttcagatgtacgtgaaaagtgtttcgacgttagaaaaagagcttttactttccctgatttgggtgaaaaagcacaattggtatgcatatccactacaagtggtactggttctgaagttacaccttttgcttgcatcaccgatccaaaaactggttataagtaccaattgacagactacgccttaatgcctaccgtagctattgttgatccaactttagttaacgctatgccttcaagattggcagccgattccggtatggacgccttagctagagcaactgaagcatatgtttcagtctacgccaacgattttacagacggtttggcaatgcaagccattaaattgatcttcgaaaatttgccagcatccgttttgaaaggtgacgctaaggctagagaaaagatgcataatgctggtacaatagctggtatggcatccggtagtgcatttttgggtatagttcatgcaatcacacacaccattggtgcctcctatagaattagtcaaggtagatctaacgctactttgttgccattgggtattagatacaacggtagaataccaacaaagttgacctcttggcctaaatatgaaaagtacgttgctccacaaagataccaagatattgcaaagatgttgggtttacctgctgcaactccagaagaaggtgtcgaaagttatgcaagagccgtagaagatttgagagctacattgaacatggaatactcttttagagcacaaggtatagaagaacatgatttcgttgctaacttagacgaaatggccttcagagcttcagatgaccaatccgctccagcaaatcctagattaccaatggttgaagatttgaagatcatcatggaagccgcttattacggtatcagtttcgatgacattgtagccagaagagcctctgctcaattggctaaatctgaagtttctaagaaaggttga

SEQ ID NO: 22 - DNA, 1599 bp, Artificial Sequence
  AADHvs
atgaacgaacaagaaatcgcccacgcagtagaaaatgtattatcaaagtacaccaacgtaaccgcacaaaacgccgaaccagtaagttattcttcaaacgctagtttggaaaacattgtatctcaagccttagctggtaacatggttaaacaaccagaaacacaaaccgcacctgatttgaactctaacatcgaaaacatagtttcccaaatcttggccgaaaaccaagctaagccacaatcagttcaatgtcaatccgctaatcatggtactacagaatatttgggttgctttgcctctatggaagaagctatttctgctgcatcacatgcacaagttcaatacagacactgtactatgggtgacagagcctcatttgtcaaaggtataagagaagtattcactcaagatgacgttttggaaaagatctccagaatggcagttgaagaaaccggtatgggtaattacgccgataaattaactaagaacagaatagccgctactaaaacaccaggtatcgaagatttgaccacttccgctttaagtggtgactctggtttgaccttaactgaattttctgcatatggtgttatcggttctattacaccaacaaccaaccctacagaaaccattattaacaactcaatcggcatgttggcagccggtaatactgttgtctactccccacatcctagaagtagaaatgtttctttggttgctgttgatttgattaatagaaagttggcagaattaggtgcaccagccaatttggtagttactgttttagaaccttcaattgataacacaaacgctatgatgaacgacccaagagtaaacatgttagttgcaacaggtggtccttcaatcgtcaagactgtaatgtccacaggtaaaaaggctattggtgctggtgcaggtaatccacctgcagtcgtagatgaaactgccaacatagaaaaggctgcaaaggatatcattaatggttgtgcctttgacaataacttgccatgtattgctgaaaaagaagtcattgttgtcaatgaagtagccgattatttgatacactgtatgaaaaagtcaggtgcttacttgttatgcgacaagcaaaagatacaacaattgcaaagtttggttttgaacgaaaaaggtaccggtccaaacacttcttttgtcggtaaaggtgctagatacatcttggataagttgaacatccaagtttctgatgacattaaggtcatattgatcgaaacagaaagaaatcatcctttcgtagttcacgaattgatgatgccaatattacctgtcgtaagagttgaaaatgtcgatgaagcaatagacttagccatcaaagttgaacatggtaacagacacacagctataatgcatagtaccaacgttgaaaagttgtctaagatggcaagattaatccaaactacaatcttcgtcaagaatggtccatcctatagtggtattggtgtaggtggtgaaggtcacaccacttttacaattgctggtcctaccggtgaaggtataacttcagctagatccttcgcaagatacagaagatgtgtaatggttgaagcattaaatattagatga

SEQ ID NO: 23 - DNA, 2676 bp, Artificial Sequence
  ADHec
atggcagtcacaaatgtagccgaattgaacgccttagtagaaagagtcaagaaagcccaaagagaatacgcaagttttacacaagaacaagttgataaaatattcagagccgctgcattggccgcagccgacgcaagaatccctttggcaaagatggctgtagcagaaagtggtatgggtattgttgaagataaagttatcaaaaaccattttgcttccgaatatatctacaatgcctacaaagatgaaaagacctgcggtgttttatcagaagatgacacatttggtaccatcactattgcagaaccaattggtattatctgcggtattgttccaaccacaaacccaacatcaactgccatcttcaaatcattaatatccttaaaaactagaaatgcaattatcttttcacctcacccaagagccaaagatgctaccaataaggctgcagacatcgttttgcaagcagccatagccgcaggtgcacctaaggacttaattggttggatagaccaaccttcagttgaattatcaaacgcattgatgcatcacccagacataaacttgatcttagcaacaggtggtcctggtatggttaaggcagcctacagttccggtaaaccagcaatcggtgttggtgctggtaatacaccagtagtcatagacgaaactgctgatatcaagagagctgtagcctcagttttaatgtccaagacatttgataatggtgttatctgtgcatctgaacaatccgttgtagttgttgattcagtctatgatgccgttagagaaagattcgccactcatggtggttacttattgcaaggtaaagaattaaaggctgttcaagatgttatcttgaagaacggtgctttgaatgctgcaatagtaggtcaacctgcttataaaatagccgaattggcaggtttttccgtacctgaaaacacaaaaatcttgattggtgaagtaacagtcgttgatgaaagtgaaccttttgcacatgaaaaattgagtcctactttggcaatgtatagagccaaagatttcgaagatgcagtcgaaaaggctgaaaaattagttgcaatgggtggtatcggtcatacatcatgcttgtacacagaccaagataatcaacctgctagagtaagttactttggtcaaaagatgaaaacagccagaatattgattaataccccagcatcacaaggtggtattggtgacttatataactttaaattggcaccatcattgaccttaggttgcggttcctggggtggtaactcaatctccgaaaacgtcggtcctaaacacttgataaacaaaaagactgttgcaaaaagagcagaaaacatgttatggcataaattgccaaagagtatctacttcagaagaggttccttaccaatcgccttggatgaagttattactgacggtcataagagagcattaatcgttacagacagatttttgttcaacaacggttatgctgaccaaatcacatcagtattgaaagccgctggtgttgaaactgaagtctttttcgaagttgaagctgatcctacattgagtatcgttagaaagggtgctgaattagctaattcttttaaacctgacgttattatcgcattgggtggtggtagtccaatggatgccgcaaaaatcatgtgggtcatgtatgaacacccagaaacacacttcgaagaattagcattgagattcatggacatcagaaaaagaatctacaaattcccaaagatgggtgtaaaggccaaaatgatcgcagttacaacaacatcaggtaccggttccgaagtaaccccatttgcagttgtcacagatgatgccactggtcaaaaatacccattagctgattatgctttgacacctgatatggccatcgttgacgctaacttggttatggacatgcctaaatcattatgcgcttttggtggtttggatgcagttacccatgcaatggaagcttatgtttcagttttagcttccgaattttctgatggtcaagctttacaagccttaaaattattgaaagaatacttgccagcatcatatcatgaaggttccaagaatcctgttgccagagaaagagtacattcagccgcaactatagccggtattgcattcgctaatgcatttttaggtgtttgtcattcaatggcccacaagttgggttctcaatttcatataccacatggtttggcaaatgccttattaatttgtaacgttatcagatataacgccaatgacaatccaactaaacaaacagcattttcccaatacgacagaccacaagcaagaagaagatacgcagaaatcgcagatcatttgggtttgtctgcacctggtgacagaaccgcagctaagattgaaaagttattagcatggttggaaaccttaaaggcagaattgggtatcccaaagtctattagagaagcaggtgtccaagaagcagatttcttagccaatgtagacaagttgtccgaagatgcattcgatgaccaatgcacaggtgcaaatccaagatatccattgatctccgaattaaaacaaatattattggacacatactatggtagagattatgtagaaggtgaaaccgcagccaagaaagaagcagctccagctaaggcagaaaagaaggctaaaaagtccgcttaa

SEQ ID NO: 24 - DNA, 2658 bp, Artificial Sequence
  AHEpm
atgtctggtttacaaatgttccaaaacttgtccttatacggttctttagccgaaatagatacctctgaaaaattgaatgaagctatggacaaattgacagccgcacaagaacaattcagagaatataaccaagaacaagttgataagatctttaaggccgtcgcattggcagcttcacaaaacagagttgctttcgcaaaatacgcacacgaagaaactcaaaagggtgtttttgaagataaagttatcaaaaacgaatttgcagctgattatatctaccataaatattgtaacgacaagactgcaggtattatcgaatatgatgaagcaaatggtttaatggaaatcgcagaaccagttggtcctgttgttggtatcgcacctgttacaaacccaacatccactatcatatataagtcattaatcgcattaaagacaagaaattgcattatattctccccacatcctggtgcccataaagcttcagtttttgtagtcaaggtcttgcaccaagcagccgtaaaagctggtgcaccagaaaactgcatccaaataatctttccaaagatggacttgactacagaattgttacaccatcaaaagaccagattcatttgggcaaccggtggtccaggtttggttcatgcctcctatacttccggtaaaccagctttaggtggtggtcctggtaatgctccagcattgattgatgaaacttgcgatatgaatgaagccgtaggttctatcgtcgtttctaaaacattcgactgtggtatgatctgcgcaacagaaaacgcagttgttgtagttgaaagtgtttacgaaaactttgttgcaactatgaagaaaagaggtgcatatttcatgactccagaagaaaccaagaaagcatcaaacttgttattcggtgaaggtatgagattgaacgctaaggcagttggtcaaaccgctaaaactttggctgaaatggccggtttcgaagttcctgaaaacacagttgtcttgtgtggtgaagcttccgaagttaaatttgaagaacctatggctcatgaaaaattaactacaatcttaggtatatataaggcaaaggattttgatgacggtgttagattgtgcaaggaattggtcacatttggtggtaaaggtcatacagcagttttatatacaaatcaaaataataaggatagaatcgaaaagtaccaaaatgaagttcctgcatttcatatcttagttgatatgccttcttccttgggttgcattggtgacatgtataactttagattagcaccagccttgacaatcacatgtggtactatgggtggtggttccagttccgacaacatcggtccaaagcacttgttaaatattaaaagagttggtatgagaagagaaaacatgttatggttcaaaattcctaagagtgtttacttcaaaagagccattttatctgaagctttatcagacttgagagacacccataagagagcaataatcatcaccgatagaactatgactatgttgggtcaaacagacaagatcattaaagcatgcgaaggtcacggtatggtatgcactgtctacgataaggttgtcccagatcctacaatcaagtgtatcatggaaggtgttaacgaaatgaacgtattcaagccagatttggccattgccttgggtggtggttcagctatggatgcagcaaaaatgatgagattattttacgaatatccagatcaagacttgcaagatattgccacaagattcgttgacatcagaaagagagtagttggttgtcctaaattgggtagattaatcaagactttagtctgtatacctactacatcaggtaccggtgcagaagttaccccatttgcagttgtcacatccgaagaaggtagaaaatatcctttagtcgattatgaattaacccctgacatggctattgttgatccagaatttgccgttggtatgccaaagagattgacatcatggactggtatcgacgcattgactcacgcaatcgaatcctatgtcagtattatggcaactgactttacaagaccttattcattgagagcagttggtttaatttttgaatccttgtcattagcctataacaatggtaaagacattgaagctagagaaaagatgcacaatgcttccgccattgccggtatggcctttgcaaatgcatttttgggttgctgtcattccgtagcccaccaattgggttctgtttatcacatccctcatggtttggccaatgctttgatgttgtcccacataatcaaatataatgcaaccgactctcctgttaaaatgggtacatttccacaatacaaataccctcaagcaatgagacactatgctgaaatcgccgaattattgttgccacctacccaagtcgtaaaaatgactgatgttgacaaagttcaatatttgattgatagagttgaacaattgaaagctgatgttggtattcctaaatccattaaggaaactggtatggtcaccgaagaagatttctttaacaaggttgatcaagttgctatcatggccttcgacgatcaatgtacaggtgctaacccaagatacccattagtctccgaattaaaacaattgatgatagatgcctggaatggtgtagtccctaagttataa

SEQ ID NO: 25 - DNA, 1380 bp, Artificial Sequence
  EUTEdz
atggaacactccgtcattgaaccaaccgtccctatgcctttgccagctatgtttgatgccccttcaggtatcttctcctccttagacgatgcagttcaagccgctactttagcccaacaacaattgtcatccgttgaattgagacaacaagtcataaaggcaattagagttgccggtgaaagatacgctcaagtcttggcagaaatggccgtcgcagaaaccggtatgggtagagttgtagataaatacattaagaatgtttcacaagcaagacatacaccaggtatcgaatgtttatccgctgaagtattaacaggtgacaacggtttgaccttgattgaaaatgcaccttggggtgttgttgcttccgttacaccatcaaccaacccagctgctacagttattaacaacgcaatttctatgatcgctgccggtaactcagttgtctttgcacctcatccatctgcaaagaatgtttccttaagaactatctccttgttgaataaggcaatagtagccacaggtggtccagaaaatttgttagtctctgttgcaaaccctaatatcgaaactgcacaaagattgtttagatatccaggtatcggtttgttggttgtaaccggtggtgaagctgtagtcgaagctgcaagaaagcataccgataaaagattaatcgctgcaggtgcaggtaatccaccagttgttgttgacgaaacagctgatatccctaaggcagcaagagccattgttaaaggtgcatcattcgataacaatattatctgtgccgatgaaaaagttttaattgtagttgacagagttgccgatgcattattggccgaaatgcaaagaaataacgcagtattattgactccagaacaaacagaaagattgttaccagctttgttatctgatatcgacgaacaaggtaaaggtagagttaacagagactacgttggtagagatgccgctaaattagcagctgcaatcggtttggaagtctcagaacatacaagattattgttggcagaaacagatgcagatcatccattcgctgttacagaattaatgatgccagttttacctgtcatcagagtcaagaacgttgatgacgcaattgctttggcagtcaaattggaatctggttgtagacatactgctgctatgcattcaaccaacataagaaatttgaatagaatggccaacgctataaatacatcaatattcgttaagaatggtccttgtatcgctggtttaggtttgggtggtgaaggttggacaagtatgacaatcagtaccccaactggtgaaggtgttacatcagctagaacctttgttagattgagaagatgcgtcttagtagatatgtttagaatagcctaa

SEQ ID NO: 26 - DNA, 1404 bp, Artificial Sequence
  EUTEec
atgaaccaacaagacatagaacaagtagtaaaagccgtattattgaagatgcaaagttccgacactccaccagccgccgtccacgaaatgggtgtattcgcatcattagatgacgcagttgctgccgctaaagttgcccaacaaggtttgaagtcagttgctatgagacaattggcaattgctgcaattagagaagctggtgaaaaacatgccagagacttggccgaattagctgtctcagaaactggtatgggtagagttgaagataaatttgccaaaaacgttgcacaagctagaggtactcctggtgtagaatgtttgtccccacaagttttaacaggtgacaacggtttgaccttaattgaaaatgccccttggggtgttgtagcttctgtcacaccttcaaccaaccctgctgctaccttgatcaataacgctatttccttgattgctgccggtaattccgttatcttcgctccacatccagcagccaagaaagtttcacaaagagccatcaccttgttgaatcaagcaatcgttgctgcaggtggtccagaaaacttattggttacagtcgcaaaccctgacatcgaaacagctcaaagattgtttaaatttcctggtataggtttgttagttgtaactggtggtgaagctgtagttgaagcagctagaaagcatactaataagagattgattgctgcaggtgccggtaatcctccagtcgttgttgatgaaacagcagatttggccagagctgcacaatccatcgttaagggtgcatctttcgataacaatattatctgtgcagatgaaaaggtcttaatcgttgtagattccgttgctgatgaattgatgagattgatggaaggtcaacatgcagtcaaattgacagctgaacaagcccaacaattgcaacctgtattattgaagaatatcgacgaaagaggtaaaggtaccgtttcaagagactgggttggtagagatgctgcaaaaattgctgcagctatcggtttaaacgttcctcaagaaaccagattgttgtttgttgaaactaccgcagaacaccctttcgcagttaccgaattgatgatgcctgtattgccagtagtcagagttgccaacgttgctgatgcaatagccttggcagttaaattggaaggtggttgtcaccatacagcagctatgcattcaagaaatatagaaaatatgaaccaaatggctaacgcaatagacacatctatctttgttaagaacggtccttgcatagctggtttgggtttaggtggtgaaggttggacaaccatgacaatcactactccaacaggtgaaggtgtcacatcagcaagaacctttgttagattaagaagatgcgtcttggtagatgcctttagaatagtataa

SEQ ID NO: 27 - DNA, 1410 bp, Artificial Sequence
  LIN1129li
atggaatcattagaattagaacaattagtcaagaaggtattattagaaaagttggcagaacaaaaggaagtccctacaaagaccacaacccaaggtgcaaaatctggtgtattcgatacagttgacgaagccgtacaagcagctgttatagctcaaaattgttacaaggaaaaatccttggaagaaagaagaaatgttgtaaaagcaataagagaagccttatacccagaaattgaaactatagctacaagagcagttgctgaaactggtatgggtaacgttaccgataaaattttgaagaataccttggctattgaaaagacccctggtgtagaagatttgtacacagaagtcgctacaggtgacaatggtatgaccttgtatgaattatcaccatacggtgttattggtgctgttgcaccttctaccaacccaaccgaaacattaatttgtaactctattggtatgttagcagctggtaatgccgtattttattcaccacaccctggtgccaaaaatatctcattatggttgattgaaaagttgaataccatagttagagattcctgtggtatagataacttgatagtaacagtcgctaaaccaagtatccaagctgcacaagaaatgatgaatcatcctaaggttccattattggttataaccggtggtccaggtgttgtcttgcaagcaatgcaatccggtaaaaaggttatcggtgcaggtgcaggtaatcctccaagtatagttgacgaaactgctaacatagaaaaagcagccgcagacatcgttgatggtgcctcatttgatcataatatcttgtgtatagctgaaaagagtgtcgttgctgtagattccattgccgatttcttgttatttcaaatggaaaagaatggtgcattgcatgttaccaacccttctgatattcaaaaattagaaaaggtagccgttacagataagggtgtcactaataagaaattagttggtaaatccgccactgaaatcttgaaggaagcaggtatagcttgtgactttacaccaagattgataatcgttgaaaccgaaaaatcccatccatttgcaacagttgaattgttaatgcctatcgttccagttgtcagagttccagatttcgatgaagcattggaagttgctattgaattagaacaaggtttgcatcacacagctactatgcactctcaaaatatttccagattgaataaggcagcaagagatatgcaaacaagtatcttcgtcaaaaatggtccttcttttgcaggtttgggtttcagaggtgaaggttcaaccacttttacaattgccactccaaccggtgaaggtactaccacagccagacatttcgccagaagaagaagatgcgtcttgacagatggttttagtattagataa

SEQ ID NO: 28 - DNA, 6702 bp, Artificial Sequence
  ACC1sc
atgagcgaagaaagcttattcgagtcttctccacagaagatggagtacgaaattacaaactactcagaaagacatacagaacttccaggtcatttcattggcctcaatacagtagataaactagaggagtccccgttaagggactttgttaagagtcacggtggtcacacggtcatatccaagatcctgatagcaaataatggtattgccgccgtgaaagaaattagatccgtcagaaaatgggcatacgagacgttcggcgatgacagaaccgtccaattcgtcgccatggccaccccagaagatctggaggccaacgcagaatatatccgtatggccgatcaatacattgaagtgccaggtggtactaataataacaactacgctaacgtagacttgatcgtagacatcgccgaaagagcagacgtagacgccgtatgggctggctggggtcacgcctccgagaatccactattgcctgaaaaattgtcccagtctaagaggaaagtcatctttattgggcctccaggtaacgccatgaggtctttaggtgataaaatctcctctaccattgtcgctcaaagtgctaaagtcccatgtattccatggtctggtaccggtgttgacaccgttcacgtggacgagaaaaccggtctggtctctgtcgacgatgacatctatcaaaagggttgttgtacctctcctgaagatggtttacaaaaggccaagcgtattggttttcctgtcatgattaaggcatccgaaggtggtggtggtaaaggtatcagacaagttgaacgtgaagaagatttcatcgctttataccaccaggcagccaacgaaattccaggctcccccattttcatcatgaagttggccggtagagcgcgtcacttggaagttcaactgctagcagatcagtacggtacaaatatttccttgttcggtagagactgttccgttcagagacgtcatcaaaaaattatcgaagaagcaccagttacaattgccaaggctgaaacatttcacgagatggaaaaggctgccgtcagactggggaaactagtcggttatgtctctgccggtaccgtggagtatctatattctcatgatgatggaaaattctactttttagaattgaacccaagattacaagtcgagcatccaacaacggaaatggtctccggtgttaacttacctgcagctcaattacaaatcgctatgggtatccctatgcatagaataagtgacattagaactttatatggtatgaatcctcattctgcctcagaaatcgatttcgaattcaaaactcaagatgccaccaagaaacaaagaagacctattccaaagggtcattgtaccgcttgtcgtatcacatcagaagatccaaacgatggattcaagccatcgggtggtactttgcatgaactaaacttccgttcttcctctaatgtttggggttacttctccgtgggtaacaatggtaatattcactccttttcggactctcagttcggccatatttttgcttttggtgaaaatagacaagcttccaggaaacacatggttgttgccctgaaggaattgtccattaggggtgatttcagaactactgtggaatacttgatcaaacttttggaaactgaagatttcgaggataacactattaccaccggttggttggacgatttgattactcataaaatgaccgctgaaaagcctgatccaactcttgccgtcatttgcggtgccgctacaaaggctttcttagcatctgaagaagcccgccacaagtatatcgaatccttacaaaagggacaagttctatctaaagacctactgcaaactatgttccctgtagattttatccatgagggtaaaagatacaagttcaccgtagctaaatccggtaatgaccgttacacattatttatcaatggttctaaatgtgatatcatactgcgtcaactagctgatggtggtcttttgattgccataggcggtaaatcgcataccatctattggaaagaagaagttgctgctacaagattatccgttgactctatgactactttgttggaagttgaaaacgatccaacccagttgcgtactccatcccctggtaaattggttaaattcttggtggaaaatggtgaacacattatcaagggccaaccatatgcagaaattgaagttatgaaaatgcaaatgcctttggtttctcaagaaaatggtatcgtccagttattaaagcaacctggttctaccattgttgcaggtgatatcatggctattatgactcttgacgatccatccaaggtcaagcacgctctaccatttgaaggtatgctgccagattttggttctccagttatcgaaggaaccaaacctgcctataaattcaagtcattagtgtctactttggaaaacattttgaagggttatgacaaccaagttattatgaacgcttccttgcaacaattgatagaggttttgagaaatccaaaactgccttactcagaatggaaactacacatctctgctttacattcaagattgcctgctaagctagatgaacaaatggaagagttagttgcacgttctttgagacgtggtgctgttttcccagctagacaattaagtaaattgattgatatggccgtgaagaatcctgaatacaaccccgacaaattgctgggcgccgtcgtggaaccattggcggatattgctcataagtactctaacgggttagaagcccatgaacattctatatttgtccatttcttggaagaatattacgaagttgaaaagttattcaatggtccaaatgttcgtgaggaaaatatcattctgaaattgcgtgatgaaaaccctaaagatctagataaagttgcgctaactgttttgtctcattcgaaagtttcagcgaagaataacctgatcctagctatcttgaaacattatcaaccattgtgcaagttatcttctaaagtttctgccattttctctactcctctacaacatattgttgaactagaatctaaggctaccgctaaggtcgctctacaagcaagagaaattttgattcaaggcgctttaccttcggtcaaggaaagaactgaacaaattgaacatatcttaaaatcctctgttgtgaaggttgcctatggctcatccaatccaaagcgctctgaaccagatttgaatatcttgaaggacttgatcgattctaattacgttgtgttcgatgttttacttcaattcctaacccatcaagacccagttgtgactgctgcagctgctcaagtctatattcgtcgtgcttatcgtgcttacaccataggagatattagagttcacgaaggtgtcacagttccaattgttgaatggaaattccaactaccttcagctgcgttctccacctttccaactgttaaatctaaaatgggtatgaacagggctgtttctgtttcagatttgtcatatgttgcaaacagtcagtcatctccgttaagagaaggtattttgatggctgtggatcatttagatgatgttgatgaaattttgtcacaaagtttggaagttattcctcgtcaccaatcttcttctaacggacctgctcctgatcgttctggtagctccgcatcgttgagtaatgttgctaatgtttgtgttgcttctacagaaggtttcgaatctgaagaggaaattttggtaaggttgagagaaattttggatttgaataagcaggaattaatcaatgcttctatccgtcgtatcacatttatgttcggttttaaagatgggtcttatccaaagtattatacttttaacggtccaaattataacgaaaatgaaacaattcgtcacattgagccggctttggccttccaactggaattaggaagattgtccaacttcaacattaaaccaattttcactgataatagaaacatccatgtctacgaagctgttagtaagacttctccattggataagagattctttacaagaggtattattagaacgggtcatatccgtgatgacatttctattcaagaatatctgacttctgaagctaacagattgatgagtgatatattggataatttagaagtcaccgacacttcaaattctgatttgaatcatatcttcatcaacttcattgcggtgtttgatatctctccagaagatgtcgaagccgccttcggtggtttcttagaaagatttggtaagagattgttgagattgcgtgtttcttctgccgaaattagaatcatcatcaaagatcctcaaacaggtgccccagtaccattgcgtgccttgatcaataacgtttctggttatgttatcaaaacagaaatgtacaccgaagtcaagaacgcaaaaggtgaatgggtatttaagtctttgggtaaacctggatccatgcatttaagacctattgctactccttaccctgttaaggaatggttgcaaccaaaacgttataaggcacacttgatgggtaccacatatgtctatgacttcccagaattattccgccaagcatcgtcatcccaatggaaaaatttctctgcagatgttaagttaacagatgatttctttatttccaacgagttgattgaagatgaaaacggcgaattaactgaggtggaaagagaacctggtgccaacgctattggtatggttgcctttaagattactgtaaagactcctgaatatccaagaggccgtcaatttgttgttgttgctaacgatatcacattcaagatcggttcctttggtccacaagaagacgaattcttcaataaggttactgaatatgctagaaagcgtggtatcccaagaatttacttggctgcaaactcaggtgccagaattggtatggctgaagagattgttccactatttcaagttgcatggaatgatgctgccaatccggacaagggcttccaatacttatacttaacaagtgaaggtatggaaactttaaagaaatttgacaaagaaaattctgttctcactgaacgtactgttataaacggtgaagaaagatttgtcatcaagacaattattggttctgaagatgggttaggtgtcgaatgtctacgtggatctggtttaattgctggtgcaacgtcaagggcttaccacgatatcttcactatcaccttagtcacttgtagatccgtcggtatcggtgcttatttggttcgtttgggtcaaagagctattcaggtcgaaggccagccaattattttaactggtgctcctgcaatcaacaaaatgctgggtagagaagtttatacttctaacttacaattgggtggtactcaaatcatgtataacaacggtgtttcacatttgactgctgttgacgatttagctggtgtagagaagattgttgaatggatgtcttatgttccagccaagcgtaatatgccagttcctatcttggaaactaaagacacatgggatagaccagttgatttcactccaactaatgatgaaacttacgatgtaagatggatgattgaaggtcgtgagactgaaagtggatttgaatatggtttgtttgataaagggtctttctttgaaactttgtcaggatgggccaaaggtgttgtcgttggtagagcccgtcttggtggtattccactgggtgttattggtgttgaaacaagaactgtcgagaacttgattcctgctgatccagctaatccaaatagtgctgaaacattaattcaagaacctggtcaagtttggcatccaaactccgccttcaagactgctcaagctatcaatgactttaacaacggtgaacaattgccaatgatgattttggccaactggagaggtttctctggtggtcaacgtgatatgttcaacgaagtcttgaagtatggttcgtttattgttgacgcattggtggattacaaacaaccaattattatctatatcccacctaccggtgaactaagaggtggttcatgggttgttgtcgatccaactatcaacgctgaccaaatggaaatgtatgccgacgtcaacgctagagctggtgttttggaaccacaaggtatggttggtatcaagttccgtagagaaaaattgctggacaccatgaacagattggatgacaagtacagagaattgagatctcaattatccaacaagagtttggctccagaagtacatcagcaaatatccaagcaattagctgatcgtgagagagaactattgccaatttacggacaaatcagtcttcaatttgctgatttgcacgataggtcttcacgtatggtggccaagggtgttatttctaaggaactggaatggaccgaggcacgtcgtttcttcttctggagattgagaagaagattgaacgaagaatatttgattaaaaggttgagccatcaggtaggcgaagcatcaagattagaaaagatcgcaagaattagatcgtggtaccctgcttcagtggaccatgaagatgataggcaagtcgcaacatggattgaagaaaactacaaaactttggacgataaactaaagggtttgaaattagagtcattcgctcaagacttagctaaaaagatcagaagcgaccatgacaatgctattgatggattatctgaagttatcaagatgttatctaccgatgataaagaaaaattgttgaagactttgaaataa

SEQ ID NO: 29 - DNA, 6702 bp, Artificial Sequence
  ACC1sc_s659A/s1157A
atgagcgaagaaagcttattcgagtcttctccacagaagatggagtacgaaattacaaactactcagaaagacatacagaacttccaggtcatttcattggcctcaatacagtagataaactagaggagtccccgttaagggactttgttaagagtcacggtggtcacacggtcatatccaagatcctgatagcaaataatggtattgccgccgtgaaagaaattagatccgtcagaaaatgggcatacgagacgttcggcgatgacagaaccgtccaattcgtcgccatggccaccccagaagatctggaggccaacgcagaatatatccgtatggccgatcaatacattgaagtgccaggtggtactaataataacaactacgctaacgtagacttgatcgtagacatcgccgaaagagcagacgtagacgccgtatgggctggctggggtcacgcctccgagaatccactattgcctgaaaaattgtcccagtctaagaggaaagtcatctttattgggcctccaggtaacgccatgaggtctttaggtgataaaatctcctctaccattgtcgctcaaagtgctaaagtcccatgtattccatggtctggtaccggtgttgacaccgttcacgtggacgagaaaaccggtctggtctctgtcgacgatgacatctatcaaaagggttgttgtacctctcctgaagatggtttacaaaaggccaagcgtattggttttcctgtcatgattaaggcatccgaaggtggtggtggtaaaggtatcagacaagttgaacgtgaagaagatttcatcgctttataccaccaggcagccaacgaaattccaggctcccccattttcatcatgaagttggccggtagagcgcgtcacttggaagttcaactgctagcagatcagtacggtacaaatatttccttgttcggtagagactgttccgttcagagacgtcatcaaaaaattatcgaagaagcaccagttacaattgccaaggctgaaacatttcacgagatggaaaaggctgccgtcagactggggaaactagtcggttatgtctctgccggtaccgtggagtatctatattctcatgatgatggaaaattctactttttagaattgaacccaagattacaagtcgagcatccaacaacggaaatggtctccggtgttaacttacctgcagctcaattacaaatcgctatgggtatccctatgcatagaataagtgacattagaactttatatggtatgaatcctcattctgcctcagaaatcgatttcgaattcaaaactcaagatgccaccaagaaacaaagaagacctattccaaagggtcattgtaccgcttgtcgtatcacatcagaagatccaaacgatggattcaagccatcgggtggtactttgcatgaactaaacttccgttcttcctctaatgtttggggttacttctccgtgggtaacaatggtaatattcactccttttcggactctcagttcggccatatttttgcttttggtgaaaatagacaagcttccaggaaacacatggttgttgccctgaaggaattgtccattaggggtgatttcagaactactgtggaatacttgatcaaacttttggaaactgaagatttcgaggataacactattaccaccggttggttggacgatttgattactcataaaatgaccgctgaaaagcctgatccaactcttgccgtcatttgcggtgccgctacaaaggctttcttagcatctgaagaagcccgccacaagtatatcgaatccttacaaaagggacaagttctatctaaagacctactgcaaactatgttccctgtagattttatccatgagggtaaaagatacaagttcaccgtagctaaatccggtaatgaccgttacacattatttatcaatggttctaaatgtgatatcatactgcgtcaactagctgatggtggtcttttgattgccataggcggtaaatcgcataccatctattggaaagaagaagttgctgctacaagattatccgttgactctatgactactttgttggaagttgaaaacgatccaacccagttgcgtactccatcccctggtaaattggttaaattcttggtggaaaatggtgaacacattatcaagggccaaccatatgcagaaattgaagttatgaaaatgcaaatgcctttggtttctcaagaaaatggtatcgtccagttattaaagcaacctggttctaccattgttgcaggtgatatcatggctattatgactcttgacgatccatccaaggtcaagcacgctctaccatttgaaggtatgctgccagattttggttctccagttatcgaaggaaccaaacctgcctataaattcaagtcattagtgtctactttggaaaacattttgaagggttatgacaaccaagttattatgaacgcttccttgcaacaattgatagaggttttgagaaatccaaaactgccttactcagaatggaaactacacatctctgctttacattcaagattgcctgctaagctagatgaacaaatggaagagttagttgcacgttctttgagacgtggtgctgttttcccagctagacaattaagtaaattgattgatatggccgtgaagaatcctgaatacaaccccgacaaattgctgggcgccgtcgtggaaccattggcggatattgctcataagtactctaacgggttagaagcccatgaacattctatatttgtccatttcttggaagaatattacgaagttgaaaagttattcaatggtccaaatgttcgtgaggaaaatatcattctgaaattgcgtgatgaaaaccctaaagatctagataaagttgcgctaactgttttgtctcattcgaaagtttcagcgaagaataacctgatcctagctatcttgaaacattatcaaccattgtgcaagttatcttctaaagtttctgccattttctctactcctctacaacatattgttgaactagaatctaaggctaccgctaaggtcgctctacaagcaagagaaattttgattcaaggcgctttaccttcggtcaaggaaagaactgaacaaattgaacatatcttaaaatcctctgttgtgaaggttgcctatggctcatccaatccaaagcgctctgaaccagatttgaatatcttgaaggacttgatcgattctaattacgttgtgttcgatgttttacttcaattcctaacccatcaagacccagttgtgactgctgcagctgctcaagtctatattcgtcgtgcttatcgtgcttacaccataggagatattagagttcacgaaggtgtcacagttccaattgttgaatggaaattccaactaccttcagctgcgttctccacctttccaactgttaaatctaaaatgggtatgaacagggctgttgctgtttcagatttgtcatatgttgcaaacagtcagtcatctccgttaagagaaggtattttgatggctgtggatcatttagatgatgttgatgaaattttgtcacaaagtttggaagttattcctcgtcaccaatcttcttctaacggacctgctcctgatcgttctggtagctccgcatcgttgagtaatgttgctaatgtttgtgttgcttctacagaaggtttcgaatctgaagaggaaattttggtaaggttgagagaaattttggatttgaataagcaggaattaatcaatgcttctatccgtcgtatcacatttatgttcggttttaaagatgggtcttatccaaagtattatacttttaacggtccaaattataacgaaaatgaaacaattcgtcacattgagccggctttggccttccaactggaattaggaagattgtccaacttcaacattaaaccaattttcactgataatagaaacatccatgtctacgaagctgttagtaagacttctccattggataagagattctttacaagaggtattattagaacgggtcatatccgtgatgacatttctattcaagaatatctgacttctgaagctaacagattgatgagtgatatattggataatttagaagtcaccgacacttcaaattctgatttgaatcatatcttcatcaacttcattgcggtgtttgatatctctccagaagatgtcgaagccgccttcggtggtttcttagaaagatttggtaagagattgttgagattgcgtgtttcttctgccgaaattagaatcatcatcaaagatcctcaaacaggtgccccagtaccattgcgtgccttgatcaataacgtttctggttatgttatcaaaacagaaatgtacaccgaagtcaagaacgcaaaaggtgaatgggtatttaagtctttgggtaaacctggatccatgcatttaagacctattgctactccttaccctgttaaggaatggttgcaaccaaaacgttataaggcacacttgatgggtaccacatatgtctatgacttcccagaattattccgccaagcatcgtcatcccaatggaaaaatttctctgcagatgttaagttaacagatgatttctttatttccaacgagttgattgaagatgaaaacggcgaattaactgaggtggaaagagaacctggtgccaacgctattggtatggttgcctttaagattactgtaaagactcctgaatatccaagaggccgtcaatttgttgttgttgctaacgatatcacattcaagatcggttcctttggtccacaagaagacgaattcttcaataaggttactgaatatgctagaaagcgtggtatcccaagaatttacttggctgcaaactcaggtgccagaattggtatggctgaagagattgttccactatttcaagttgcatggaatgatgctgccaatccggacaagggcttccaatacttatacttaacaagtgaaggtatggaaactttaaagaaatttgacaaagaaaattctgttctcactgaacgtactgttataaacggtgaagaaagatttgtcatcaagacaattattggttctgaagatgggttaggtgtcgaatgtctacgtggatctggtttaattgctggtgcaacgtcaagggcttaccacgatatcttcactatcaccttagtcacttgtagatccgtcggtatcggtgcttatttggttcgtttgggtcaaagagctattcaggtcgaaggccagccaattattttaactggtgctcctgcaatcaacaaaatgctgggtagagaagtttatacttctaacttacaattgggtggtactcaaatcatgtataacaacggtgtttcacatttgactgctgttgacgatttagctggtgtagagaagattgttgaatggatgtcttatgttccagccaagcgtaatatgccagttcctatcttggaaactaaagacacatgggatagaccagttgatttcactccaactaatgatgaaacttacgatgtaagatggatgattgaaggtcgtgagactgaaagtggatttgaatatggtttgtttgataaagggtctttctttgaaactttgtcaggatgggccaaaggtgttgtcgttggtagagcccgtcttggtggtattccactgggtgttattggtgttgaaacaagaactgtcgagaacttgattcctgctgatccagctaatccaaatagtgctgaaacattaattcaagaacctggtcaagtttggcatccaaactccgccttcaagactgctcaagctatcaatgactttaacaacggtgaacaattgccaatgatgattttggccaactggagaggtttctctggtggtcaacgtgatatgttcaacgaagtcttgaagtatggttcgtttattgttgacgcattggtggattacaaacaaccaattattatctatatcccacctaccggtgaactaagaggtggttcatgggttgttgtcgatccaactatcaacgctgaccaaatggaaatgtatgccgacgtcaacgctagagctggtgttttggaaccacaaggtatggttggtatcaagttccgtagagaaaaattgctggacaccatgaacagattggatgacaagtacagagaattgagatctcaattatccaacaagagtttggctccagaagtacatcagcaaatatccaagcaattagctgatcgtgagagagaactattgccaatttacggacaaatcagtcttcaatttgctgatttgcacgataggtcttcacgtatggtggccaagggtgttatttctaaggaactggaatggaccgaggcacgtcgtttcttcttctggagattgagaagaagattgaacgaagaatatttgattaaaaggttgagccatcaggtaggcgaagcatcaagattagaaaagatcgcaagaattagatcgtggtaccctgcttcagtggaccatgaagatgataggcaagtcgcaacatggattgaagaaaactacaaaactttggacgataaactaaagggtttgaaattagagtcattcgctcaagacttagctaaaaagatcagaagcgaccatgacaatgctattgatggattatctgaagttatcaagatgttatctaccgatgataaagaaaaattgttgaagactttgaaataa

SEQ ID NO: 30 - DNA, 6702 bp, Artificial Sequence
  ACC1sc_s1157A
atgagcgaagaaagcttattcgagtcttctccacagaagatggagtacgaaattacaaactactcagaaagacatacagaacttccaggtcatttcattggcctcaatacagtagataaactagaggagtccccgttaagggactttgttaagagtcacggtggtcacacggtcatatccaagatcctgatagcaaataatggtattgccgccgtgaaagaaattagatccgtcagaaaatgggcatacgagacgttcggcgatgacagaaccgtccaattcgtcgccatggccaccccagaagatctggaggccaacgcagaatatatccgtatggccgatcaatacattgaagtgccaggtggtactaataataacaactacgctaacgtagacttgatcgtagacatcgccgaaagagcagacgtagacgccgtatgggctggctggggtcacgcctccgagaatccactattgcctgaaaaattgtcccagtctaagaggaaagtcatctttattgggcctccaggtaacgccatgaggtctttaggtgataaaatctcctctaccattgtcgctcaaagtgctaaagtcccatgtattccatggtctggtaccggtgttgacaccgttcacgtggacgagaaaaccggtctggtctctgtcgacgatgacatctatcaaaagggttgttgtacctctcctgaagatggtttacaaaaggccaagcgtattggttttcctgtcatgattaaggcatccgaaggtggtggtggtaaaggtatcagacaagttgaacgtgaagaagatttcatcgctttataccaccaggcagccaacgaaattccaggctcccccattttcatcatgaagttggccggtagagcgcgtcacttggaagttcaactgctagcagatcagtacggtacaaatatttccttgttcggtagagactgttccgttcagagacgtcatcaaaaaattatcgaagaagcaccagttacaattgccaaggctgaaacatttcacgagatggaaaaggctgccgtcagactggggaaactagtcggttatgtctctgccggtaccgtggagtatctatattctcatgatgatggaaaattctactttttagaattgaacccaagattacaagtcgagcatccaacaacggaaatggtctccggtgttaacttacctgcagctcaattacaaatcgctatgggtatccctatgcatagaataagtgacattagaactttatatggtatgaatcctcattctgcctcagaaatcgatttcgaattcaaaactcaagatgccaccaagaaacaaagaagacctattccaaagggtcattgtaccgcttgtcgtatcacatcagaagatccaaacgatggattcaagccatcgggtggtactttgcatgaactaaacttccgttcttcctctaatgtttggggttacttctccgtgggtaacaatggtaatattcactccttttcggactctcagttcggccatatttttgcttttggtgaaaatagacaagcttccaggaaacacatggttgttgccctgaaggaattgtccattaggggtgatttcagaactactgtggaatacttgatcaaacttttggaaactgaagatttcgaggataacactattaccaccggttggttggacgatttgattactcataaaatgaccgctgaaaagcctgatccaactcttgccgtcatttgcggtgccgctacaaaggctttcttagcatctgaagaagcccgccacaagtatatcgaatccttacaaaagggacaagttctatctaaagacctactgcaaactatgttccctgtagattttatccatgagggtaaaagatacaagttcaccgtagctaaatccggtaatgaccgttacacattatttatcaatggttctaaatgtgatatcatactgcgtcaactatctgatggtggtcttttgattgccataggcggtaaatcgcataccatctattggaaagaagaagttgctgctacaagattatccgttgactctatgactactttgttggaagttgaaaacgatccaacccagttgcgtactccatcccctggtaaattggttaaattcttggtggaaaatggtgaacacattatcaagggccaaccatatgcagaaattgaagttatgaaaatgcaaatgcctttggtttctcaagaaaatggtatcgtccagttattaaagcaacctggttctaccattgttgcaggtgatatcatggctattatgactcttgacgatccatccaaggtcaagcacgctctaccatttgaaggtatgctgccagattttggttctccagttatcgaaggaaccaaacctgcctataaattcaagtcattagtgtctactttggaaaacattttgaagggttatgacaaccaagttattatgaacgcttccttgcaacaattgatagaggttttgagaaatccaaaactgccttactcagaatggaaactacacatctctgctttacattcaagattgcctgctaagctagatgaacaaatggaagagttagttgcacgttctttgagacgtggtgctgttttcccagctagacaattaagtaaattgattgatatggccgtgaagaatcctgaatacaaccccgacaaattgctgggcgccgtcgtggaaccattggcggatattgctcataagtactctaacgggttagaagcccatgaacattctatatttgtccatttcttggaagaatattacgaagttgaaaagttattcaatggtccaaatgttcgtgaggaaaatatcattctgaaattgcgtgatgaaaaccctaaagatctagataaagttgcgctaactgttttgtctcattcgaaagtttcagcgaagaataacctgatcctagctatcttgaaacattatcaaccattgtgcaagttatcttctaaagtttctgccattttctctactcctctacaacatattgttgaactagaatctaaggctaccgctaaggtcgctctacaagcaagagaaattttgattcaaggcgctttaccttcggtcaaggaaagaactgaacaaattgaacatatcttaaaatcctctgttgtgaaggttgcctatggctcatccaatccaaagcgctctgaaccagatttgaatatcttgaaggacttgatcgattctaattacgttgtgttcgatgttttacttcaattcctaacccatcaagacccagttgtgactgctgcagctgctcaagtctatattcgtcgtgcttatcgtgcttacaccataggagatattagagttcacgaaggtgtcacagttccaattgttgaatggaaattccaactaccttcagctgcgttctccacctttccaactgttaaatctaaaatgggtatgaacagggctgttgctgtttcagatttgtcatatgttgcaaacagtcagtcatctccgttaagagaaggtattttgatggctgtggatcatttagatgatgttgatgaaattttgtcacaaagtttggaagttattcctcgtcaccaatcttcttctaacggacctgctcctgatcgttctggtagctccgcatcgttgagtaatgttgctaatgtttgtgttgcttctacagaaggtttcgaatctgaagaggaaattttggtaaggttgagagaaattttggatttgaataagcaggaattaatcaatgcttctatccgtcgtatcacatttatgttcggttttaaagatgggtcttatccaaagtattatacttttaacggtccaaattataacgaaaatgaaacaattcgtcacattgagccggctttggccttccaactggaattaggaagattgtccaacttcaacattaaaccaattttcactgataatagaaacatccatgtctacgaagctgttagtaagacttctccattggataagagattctttacaagaggtattattagaacgggtcatatccgtgatgacatttctattcaagaatatctgacttctgaagctaacagattgatgagtgatatattggataatttagaagtcaccgacacttcaaattctgatttgaatcatatcttcatcaacttcattgcggtgtttgatatctctccagaagatgtcgaagccgccttcggtggtttcttagaaagatttggtaagagattgttgagattgcgtgtttcttctgccgaaattagaatcatcatcaaagatcctcaaacaggtgccccagtaccattgcgtgccttgatcaataacgtttctggttatgttatcaaaacagaaatgtacaccgaagtcaagaacgcaaaaggtgaatgggtatttaagtctttgggtaaacctggatccatgcatttaagacctattgctactccttaccctgttaaggaatggttgcaaccaaaacgttataaggcacacttgatgggtaccacatatgtctatgacttcccagaattattccgccaagcatcgtcatcccaatggaaaaatttctctgcagatgttaagttaacagatgatttctttatttccaacgagttgattgaagatgaaaacggcgaattaactgaggtggaaagagaacctggtgccaacgctattggtatggttgcctttaagattactgtaaagactcctgaatatccaagaggccgtcaatttgttgttgttgctaacgatatcacattcaagatcggttcctttggtccacaagaagacgaattcttcaataaggttactgaatatgctagaaagcgtggtatcccaagaatttacttggctgcaaactcaggtgccagaattggtatggctgaagagattgttccactatttcaagttgcatggaatgatgctgccaatccggacaagggcttccaatacttatacttaacaagtgaaggtatggaaactttaaagaaatttgacaaagaaaattctgttctcactgaacgtactgttataaacggtgaagaaagatttgtcatcaagacaattattggttctgaagatgggttaggtgtcgaatgtctacgtggatctggtttaattgctggtgcaacgtcaagggcttaccacgatatcttcactatcaccttagtcacttgtagatccgtcggtatcggtgcttatttggttcgtttgggtcaaagagctattcaggtcgaaggccagccaattattttaactggtgctcctgcaatcaacaaaatgctgggtagagaagtttatacttctaacttacaattgggtggtactcaaatcatgtataacaacggtgtttcacatttgactgctgttgacgatttagctggtgtagagaagattgttgaatggatgtcttatgttccagccaagcgtaatatgccagttcctatcttggaaactaaagacacatgggatagaccagttgatttcactccaactaatgatgaaacttacgatgtaagatggatgattgaaggtcgtgagactgaaagtggatttgaatatggtttgtttgataaagggtctttctttgaaactttgtcaggatgggccaaaggtgttgtcgttggtagagcccgtcttggtggtattccactgggtgttattggtgttgaaacaagaactgtcgagaacttgattcctgctgatccagctaatccaaatagtgctgaaacattaattcaagaacctggtcaagtttggcatccaaactccgccttcaagactgctcaagctatcaatgactttaacaacggtgaacaattgccaatgatgattttggccaactggagaggtttctctggtggtcaacgtgatatgttcaacgaagtcttgaagtatggttcgtttattgttgacgcattggtggattacaaacaaccaattattatctatatcccacctaccggtgaactaagaggtggttcatgggttgttgtcgatccaactatcaacgctgaccaaatggaaatgtatgccgacgtcaacgctagagctggtgttttggaaccacaaggtatggttggtatcaagttccgtagagaaaaattgctggacaccatgaacagattggatgacaagtacagagaattgagatctcaattatccaacaagagtttggctccagaagtacatcagcaaatatccaagcaattagctgatcgtgagagagaactattgccaatttacggacaaatcagtcttcaatttgctgatttgcacgataggtcttcacgtatggtggccaagggtgttatttctaaggaactggaatggaccgaggcacgtcgtttcttcttctggagattgagaagaagattgaacgaagaatatttgattaaaaggttgagccatcaggtaggcgaagcatcaagattagaaaagatcgcaagaattagatcgtggtaccctgcttcagtggaccatgaagatgataggcaagtcgcaacatggattgaagaaaactacaaaactttggacgataaactaaagggtttgaaattagagtcattcgctcaagacttagctaaaaagatcagaagcgaccatgacaatgctattgatggattatctgaagttatcaagatgttatctaccgatgataaagaaaaattgttgaagactttgaaataa

SEQ ID NO: 31 - DNA, 6747 bp, Artificial Sequence
  ACC1ke
atgagtgaagaaaatttatttgaagattcatctgcaaaacgtcaatatgaaataacagattactccaagaaacataaggcattggctccacattttgtagggttaaatacacttgacaaagtcgaagaatctccactaaaagattttgttaagtctcatggtggtcatactgttatctccaaaattttaattgctaataatggtattgccgcagttaaagaaattcgttcagttagaaaatggtcttatgaaacatttggtgatgaaagaactgttcaatttgttgcaatggctactccagaagatttacaagctaattctgaatatattcgtatggctgatcaatacgtcgaagttccaggtggtacaaataataacaattatgccaacgttgatctaattgttgatgtagcagaaagaacagatgtcgatgcagtatgggccggttggggtcatgcttctgaaaatccacatttaccagaaaaattggctgcatcaaagagaaagattatattcattggtcctccaggtagcgctatgagatctttaggtgataaaatttcttctacaattgttgctcaacatgccaaggttccttgtatcccatggtcaggtactggtattgataaagttcacgttgacgaaacctctggtttagtgtctgttgatgatgatgtttaccaacaaggttgttgccaatctccagaagatggtttagccaaagctaaacagattggtttcccagttatgatcaaagcttccgaaggtggtggtggtaaaggtatcagacaagttgaacgtgaagaagactttattgcattataccatcaagctgctaatgaaattccaggttctccaatctttatcatgaagttagctggcaaggctcgtcatttggaagttcaattattggcagaccaatatggtacaaatatttctctatttggtcgtgattgttctgttcaaagacgtcaccaaaaaattatcgaagaagctccagttacaattgctaacaatgaaacttttgacaagatggctaacgctgccgttagattaggtaaattggttggttacgtatcagctggtacagtcgagtatctatattcaaatgaagagaagaaatactatttcttagaattaaacccaagattacaagtggagcatccaactacagaaatggtctctggtgttaatttaccatctgcacaattacaaattgctatgggtatacctatgcacagaattagcgatattagagtgttatatggtatgaatccacattctgctactgaaatcgatttcgaatttaagactgaagaagctaagaagacacaaagaaaaccagttccaaagggtcattgtaccgcttgtcgtattacatccgaagatccaaacgaaggattcaaaccatctggtggttctttacacgaattgaatttcagatcctcatctaatgtttggggttatttctctgtcggtaacaacggtggtatccattcattctccgattctcagtttggtcatatctttgcctttggtgaaaacagacaaatgtcaagaaaacatatggtggtagcattaaaggaactctctattagaggtgatttcagaactactgttgaatatttgatcaaacttttggaaaccgaagattttgaagaaaatacaattacaactggttggttagatgatctaatttctcataagatgactgcagaaaaacctgacgctacgttagctgttatctgtggtgctgctacaaaggcttttatcgcttctgaatctgctcgtatggaatacattgctcaattaaagagaggtcaagtcccagctaagaacctattagagactatgttccctgtcgaattcattcatgaaaataagagatacaaattcactgttgctaaatctgctgacgactcttatactttatttattaatggttccaagtgtgaagtccgtgccgttaaattatctgatggtggtttgctaatatctgttggtggtcaatcccataccatctattggaaggaagaagctcaagctaccagattatctatcgattctatgaccactttactagaagttgaaaatgatccaacccaattacgtactccatccccaggtaaattagttaaattcttagttgaaaatggcgatcaaattaaggtaggccaagcatatgccgaaattgaagttatgaaaatgcaaatgcctctggtttctcaagaaaatggtgtaatacaattattgaaacaacctggttctactattgctgccggtgatattattgctatgcttgctctagatgatccatccaaggttaaacatgctttaccttttgaaggtatgttaccagaattaggttccccaatggtcgaaggtactaagcctgcttataaattcaagtcattagtttctactttagaaaatatattaaagggttacgataaccaagtcatcatgaatgcatctctacaacaattaattgaagttttaagagatccaagattaccatactctgaatggaaactatgtgtttctgcattacactccagattgccaatgtcacttgatgaaaaactagatcaacttgttgaccgttctagtaatagaaatgctatcttcccagctaaacaattaaacaagatgattgaagatgctgttagagaacctggatctgatgagttactgccaacaatcgttgagccactattagatatcaccaatcgttatgccaatggtcttgaagctcacgaacattccgtttttgtcaaatttttggaagaatactacaatgtcgaaaagttgtttagttcccatggtaaccgtgaagaaaatgtcattttgaaattacgtgatgaaaatctagattctttagacaaggtcgtcgaaatagtcttatcgcatgctaaggtatctgccaagaacactttaatcctagctattttgaagcactaccaaccaatttgtaagatgtcttcttctgttgctcatatttttagtaaatcattaggtcacatcgtggaattagaatcaaagtccgctgccaaggttgcgttacaagcaagagaaatcttaatccaaggtgctttaccatctgttaaagaaagaaccgaacaaattgaacacatcctaagatcttctgttacaaacacatcttatggtgatttggctccaaagaaatcagaaccaaacttagaaattctaaaggatttaatcgattccaactatgttgtctttgatgttctgttaccatttttatgccacgaagatccagtcatcgctactgctgctgctcaagtttacgtgcgtcgtgcttacagagcttacactgttggtgaagttaagactccaaatattaaggattcatctattagtccattaattgaatggaaattccaattgccttctgctgcattttcttctattccacaggtcaagagcaaaattggtatgaacagagctatgtctgtttctgatctttcttacgttgttgataatgaacatgctcctttaagaacaggtattttagttgcgtctgaacatttagacgatgtcgatgcttgtctagcccaaggtttggaagctattccagaacatgctaatactgctaatggtccagctccagatagatctggtaattcatcctctttgagtaatgttgccaatgtctgtgtctcaagtactgaaggttttgaatctgaaaaagatattttagcaagagttcacgaaatcttggatttgaacaaatctgatttaatcaagtcttctatccgtcgtattacattcatgtttggtttcgcagatggtacatatccaaagtattacacattcaacggtccaaattaccaagaaaatcaaactattcgtcatatcgagccagcttgtgcattccaattggaattaggaagaatgtctaactttaatatcaagccaatctttacagaaaatagaaatatccatgtttatgaagctatcagtaaaacatctgcattagataagagattctttaccagaggtattattagaactggtcgtatccgtgacgaaatttcaattcaagaatatcttacttctgaagctaacaagttaatgagtgacattttagataatctagagattgttgacacatctaactctgatttgaaccatatctttatcaacttttctgctgtctttgatgtttctccagaggatgttgaagctgcttttggtgggttcttagaaagattcgggaagagattcttaagacttcgtgtttcagctgctgaaattcgtattattattcaagacccaaagacaggtgcggctgttccattacgtgctttaatcaacaatgtttctggttacgtagttaaatccgagctatacactgaaattaagaatgataagggagaatgggtctttaagtcactaggtaaacctggttcaatgcatttgagaccaattgctactccatatccagttaaggaatggttacaacctaaacgttataaggctcatttaatgggtaccacttatctatacgatttcccagaattattccatcaagctgccattaccacatgggagaaatatctatctaactcgtcagctaaggaattatcatctataaaggacagagacgatttatttatttctcacgaattgatcgaagatgaaaatggtgaattaactgaggtcgaaagagaacctggtgccaatactattggtatggttgcatttaaggtcacaatgaagactccagaatatccaagaggtcgtcaatttgtaattgttgctaatgatatcactttcaagattggttcctttggtccacaagaagatgaatttttcaacaaagttactgaatatgctagaaagagaggtattccaagaatatacctggctgctaactctggtgccagaattggtatcgctgaagaattggtgccattattccaagttgcttggaaggattctaaggttccagcaaagggtttcgaatatttatatttgagcaaagaaggtatggaaacattaaagagttattctaagcagaattctgttatcactgaacgtgtcgttgaagaaggtgaagaaagatatgttatcaaatctattattggtgctgatgatggtttaggtgttgaatgtttaagaggttccggtttaattgccggtgctacatcaagagcttaccaagatattttcacaattactttagttacatgtagatctgtcggtattggtgcttatttggttagattaggtcaaagagccattcaaattgaaggtcaaccaattattttaactggtgcaccagctatcaataaagtgttaggtagagaagtttattcttctaatttacaacttggtggtactcaaattatgtacaataatggtgtttctcatttaacagcttcagatgatttacaagctgttgaacaaatcattaattggttatcttatgttccggcaaagcgtaatatgcctgttccaatcttagaaaccgaagataaatgggatagagccattgatttcagaccaactaccaatgaacaatatgatgtcagatggttaatccaaggtcgtgaattagacaacggtgatttcgaatacggtatgtttgataagggttccttctttgaaactttatctggatgggctaaaggtgttgttgttggtagagctcgtttaggtggtattccaatcggtgtcattggtgttgaaacaagaaccattgaaaatgttattccagctgatccagcaaatccagattctaccgaaactgttgtccaagaagctggtcaagtttggtatccaaattctgcatttaagacggcacaagctattcaagactttaaccacggtgaacaattaccattaatgattctagccaattggagaggattctctggtggtcaacgtgatatgtacaatgaagtattgaaatatggttcatttattgttgatgccttggttgattacaaacaacctatctttatctatattccaccaactggtgaattaagaggtggttcatgggtcgtcgttgatccaactattaataatgatcatatggaaatgtatgctgataaagattcccgtgctggtgtgttagaaccttcaggtatggttggtattaaataccgtagagagaaattgttatctactataacaagattagattctacctatagagaattgaaagaaaaattatctgataaattgttatctactgaagaacatcaaaagatttctatacaactagctgaacgtgaaaagatgttaattccaatctataatcaaatcagtgtccaatttgctgatctacatgatagatcatctcgtatgttaaagaaaggtgttattaaagctgaattgacatgggaagaatctcgtcgttatttcttctggagattaagaagaagattagatgaagaatacttattaagaagattagattctcaattaacccaagcttcaagattagagaagattgcacgtgttagatcctggtatccaacttctgtcgatgtggagaacgataaagaagtagttacatggattgaagaaaattatgaaacattagaagagaaattcaaagcccttaaattggaatcatttgctttagatttagctaaaaatattagaaatgatcatgaaaatagtatgaagggtttagaagaagttgttcgtatgttaagtgcaacagataaagaaagattaaataagattattaatccagatgataaaaaataa

SEQ ID NO: 32 - DNA, 6651 bp, Artificial Sequence
  ACC1mc
atggtcgaacataagagcttgcctggccactttttaggtggtaattcactcgaatctgctcctcagggtcccgtcaaagactttgtccaagcacatgagggtcacacagtcatttccaaagtcttgattgccaacaacggtatggctgcaatgaaggagatccgttccgtaagaaagtgggcttacgagacatttggtaacgagagagctatcgaattcactgtcatggcaacacccgaggatttgaaggccaatgctgaatacatccgtatggccgataactttgtcgaggttcccggtggatccaacaacaacaactatgccaatgttgaactgattgtcgacgttgccgaaagaactgctgttcatgctgtttgggccggttggggtcatgcttccgagaatcctcgtttgcctgaaatgcttgccaagtccaagcacaagtgtttgtttattggtcctcctgcctctgccatgagatcattaggtgacaaaatttcatctacaatcgttgcacagagcgctcaagtccccacaatgggttggagtggtgatggtattaccgagacagagtttgatgctgcaggccacgttatcgtccctgacaatgcttataacgaagcctgtgtcaagactgccgagcaaggtctcaaggctgccgagaagattggtttccctgtcatgatcaaggcctccgaaggtggtggaggtaaaggtattcgtatggtcaaggatggatccaactttgcccaattgtttgcccaagtgcaaggtgaaatccctggttctcccatctttatcatgaagctggctggtaacgctcgccacttggaagtccaattgttggccgatcaatacggtaatgctatcagtttgtttggtcgtgattgttcagttcaacgtcgtcaccaaaagatcatcgaagaagctcctgtcaccattgccaagcctgatgtctttgagcaaatggagaaggctgctgtcagactcggtaaattggtgggctatgtctctgctggtaccgtggaatatctctacagtcatcacgacgatcaattctacttcttggaattgaaccctagattgcaagtcgagcatcctaccaccgagatggtttctggcgtcaatttgcctgctgctcagctccaaattgctatgggtattcctcttcaccgtatccgcgatattcgtgtcctctacggtgtccaacccaacagtgcctctgaaatcgatttcggtttcgagcaccccacctctctcaccagccatcgtcgccccacccccaagggccacgttattgcttgtcgtatcactgctgagaatcccgatgctggtttcaagccttcttctggtatcatgcaagaactcaatttcagatcgagcacaaatgtttggggttacttttctgttgtctctgctggtggtttgcacgagtatgctgattctcaatttggtcacatctttgcctatggtgagaaccgtcaacaagctcgcaagaacatggttattgctctcaaggagctctccatccgtgctgatttccgtagtaccgttgaatacattatccgtttgctcgagacccctgatttcgaagagaacaccatcaacaccggttggttggatatgttgatttccaagaagttgactgccgaacgtcctgataccatgttggctgtcttctgtggtgctgtcaccaaggctcatatggcctctttggattgtttccaacaatacaagcaatccctcgagaagggtcaagtgcccagcaagggttctctcaagactgtctttactgttgatttcatctacgaggaagtgcgctacaactttactgtcacccaatctgctcctggtatctacaccttgtatttgaacggcaccaagactcaagttggtatccgcgatttgtctgatggcggtctcttgatctctattgacggtaaatctcacactacttactctcgcgatgaagttcaagccacccgtatgatggtggatggtaagacctgtcttttggaaaaggagagtgatcctactcaattgagaagtccttctcctggtaagcttgtcaacttgctcgttgagaatggcgatcatttgaatgctggtgatgcatatgctgaaattgaggtcatgaaaatgtacatgcccttgattgctactgaagatggtcatgttcaattcatcaagcaagctggtgctactcttgaggctggtgatatcattggtatcttgtctctggatgatcctagccgtgtcaagcacgcccttcccttcaacggcactgtacctgcctttggtgctcctcacatcactggtgacaagcctgtgcaacgcttcaacgctaccaagctcaccttgcaacacatcctccaaggttacgataaccaagctcttgtccaaactgttgtcaaggattttgccgatatcttgaacaaccctgacttgccttactctgaattgaactctgttctctctgctttgtctggcagaattcctcaacgcttggaagcctctatccacaagttggctgatgaatccaaggctgctaaccaagagttccctgctgctcaatttgaaaagcttgtcgaagactttgctcgtgaacacatcacccttcaatctgaagccactgcttacaagaactctgtcgctcccttgagcagcatctttgctcgctatagaaacggtctcaccgaacacgcctacagcaactatgttgaattgatggaagcttactacgacgtcgaaatcttgttcaaccaacaacgcgaagaggaggtcatcttgtcactcagagatcagcacaaggacgacttggacaaggtgttggctgttactttgtctcatgccaaggtcaacatcaagaacaatgtgatcctcatgttgctcgacctcatcaaccctgtctccactggcagtgctcttgacaagtactttactcctatccttaagcgtttgtctgaaatcgaaagccgtgccactcaaaaggtcactctcaaggcccgtgaattgttaatcctctgtcaattgccttcttacgaggaacgtcaagctcaaatgtaccaaattctcaagaactctgtcaccgagtctgtctacggcggtggttctgaataccgcactcccagctacgacgccttcaaggatctcattgacaccaagttcaacgtctttgatgtcttgcctcacttcttctaccatgctgatccttatattgccttggctgctatcgaagtatactgtcgtcgttcttaccacgcttacaagattttggatgtcgcttacaacctcgagcacaagccttacgttgttgcctggaagttcttgctccaaactgctgctaacggcattgactccaacaagcgtattgcctcttactctgatcttaccttcttgctcaacaagactgaggaagagcctatccgtactggtgccatgactgcatgcaactctttggctgatctccaagccgagcttcctcgcatcttgactgcctttgaggaagagcctctccctcccatgttgcaacgcaatgctgctcccaaggaagaacgcatggagaacattctcaacattgctgttcgtgctgatgaggacatggatgacactgctttcagaaccaagatctgtgagatgatcactgccaatgctgatgctttccgtcaagcccatttgcgtcgtctttccgttgtcgtctgccgtgataaccaatggcccgattactacactttccgtgagcgtgaaaactaccaagaagacgagaccatccgtcacattgaacctgccatggcctatcaactcgagttggctcgtctctccaactttgacatcaagccctgtttcattgagaacagacaaatgcacgtctactatgctgttgccaaggagaacccctctgactgccgtttcttcatccgtgccttggtccgtcccggtcgtgtcaagagctccatgcgcactgctgactacttgatctctgagagtgatcgtctcttgactgacattcttgacaccctcgaaattgtcagccacgagtacaagaactctgactgtaaccacttgttcatcaacttcatccccacttttgctattgaggctgatgatgtggagcacgccttgaaggactttgtcgatcgtcatggtaagcgtctctggaagctccgtgtcactggtgccgaaatccgcttcaacgtgcaatccaagaagcctgatgcccccatcatccccatgcgtttcaccgtggacaacgtctctggcttcatcttgaaggtcgaggtctaccaagaagtcaagactgaaaagagtggatggattctcaagtctgtcaacaagatccctggtgccatgcacatgcagcccttgtctacgccttatcctaccaaggaatggctccaaccccgtcgttacaaggctcacttgatgggcaccacctacgtctatgacttccctgagctcttccgtcaatctgttcaaaaccaatggactcaagccatcaagcgcaaccctctcttgaagcaacccagccatttggttgaagccaaggagttggtcctcgacgaagatgatgtcttgcaagagattgaccgtgctcccggtaccaacactgtcggtatggttgcctggatcatgactattcgcactcccgagtatcccagtggtcgtcgcatcattgctattgccaacgacattaccttcaagattggttcctttggtgttgctgaagatcaagtcttttacaaggcatctgagctcgctcgtgctcttggtattcctcgtatctacttgtctgccaactcgggtgctcgtatcggtcttgctgaagagctcatcagccaattcagagctgcctggaaggatgcttccaaccctactgctggtttcaactacctctacttgactcctgccgagtatgatactcttgttcaacaaggtgatgccaagagtgtgctcgtggaagagatccaagatgaaggtgaaacgcgtctccgtatcactgatgtcattggccacactgatggtcttggtgtggagaacttgaagggttctggtctcattgctggtgccacctcgcgtgcctatgatgatatcttcaccatcacgcttgtcacttgtcgttccgtcggtattggtgcttaccttgtccgtctcggtcaaagaactgtccaaaacgaaggccaacccatcatcttgaccggtgctcctgccttgaacaaggtgcttggtcgtgaagtctacacctccaacttgcagttgggtggtactcaaatcatgtacaagaacggtgtctctcacttgactgccgagaatgatttggaaggtattgccaagattgtgcaatggctctcattcgtgcctgatgtccgcaacgctcctgtctctatgcgcttgggtgttgatcccattgaccgtgacattgagtacactcctcccaagggtccctctgatcctcgcttcttcttggccggtaagagtgagaacggcaagtggttgagcggtttctttgatcaagactccttcattgagaccttgagtggttgggctcgtaccgttgtcgttggtcgtgctcgtttgggtggtattcctatgggtgttgtctctgttgagacccgtactgtggagaacattgttcctgctgatcccgccaattctgattccactgagcaagtctttatggaagctggtggtgtctggttccctaactctgcttacaagactgcccaagccatcaatgacttcaacaagggtgagcaattgcctttgatgatctttgccaactggcgtggtttctctggtggtcaacgcgacatgtacaacgaagtcctcaagtacggtgctcaaatcgtggatgctctcagcaactacaagcaacctgtctttgtctacattattcccaacggtgagcttcgtggtggtgcttgggtcgttgttgatcctaccatcaacaaggacatgatggaaatgtacgctgataacaatgctcgtggtggtgtcttggagcccgagggtatcgtcgagatcaagtaccgtaagcctgccttgttggctactatggagcgtcttgacgctacttatgcttctttgaagaagcaattggccgaagaaggtaaatctgacgaagagaaggctgccctcaaggtgcaaatcgaagctcgtgaacaagaactcttgcccgtataccaacaaatctctatccaatttgctgatctccatgatcgtgctggtcgtatgaaggctaagggtgtcatccgcaaggctcttgactggcgtcgtgctcgtcactacttctactggcgtgtccgtcgtcgtctctgtgaagagtacactttccgcaagattgttgctgccactagcgctgctcccatgtctcgcgagcaaatgcttgatctcgtcaagcaatggtttaccagcgacaatgaaactgccagcttcgaagatgctgatgaactcgtctctgaatggtttgaaaagcgtgccagtgtcattgatcaacgtatcagcaagttgaagagcgatgctaccaaggaacaagtcgtgtctctcggtaatgccgatcaagaagctgtcattgaaggtttcactcaattgattgaaaacttgagcgaagatcaacgtgctgaaatcttgcgcaagcttaattctcgtttctaa

SEQ ID NO: 33 - DNA, 6702 bp, Artificial Sequence
  ACC1sc
atgagcgaagaaagcttattcgagtcttctccacagaagatggagtacgaaattacaaactactcagaaagacatacagaacttccaggtcatttcattggcctcaatacagtagataaactagaggagtccccgttaagggactttgttaagagtcacggtggtcacacggtcatatccaagatcctgatagcaaataatggtattgccgccgtgaaagaaattagatccgtcagaaaatgggcatacgagacgttcggcgatgacagaaccgtccaattcgtcgccatggccaccccagaagatctggaggccaacgcagaatatatccgtatggccgatcaatacattgaagtgccaggtggtactaataataacaactacgctaacgtagacttgatcgtagacatcgccgaaagagcagacgtagacgccgtatgggctggctggggtcacgcctccgagaatccactattgcctgaaaaattgtcccagtctaagaggaaagtcatctttattgggcctccaggtaacgccatgaggtctttaggtgataaaatctcctctaccattgtcgctcaaagtgctaaagtcccatgtattccatggtctggtaccggtgttgacaccgttcacgtggacgagaaaaccggtctggtctctgtcgacgatgacatctatcaaaagggttgttgtacctctcctgaagatggtttacaaaaggccaagcgtattggttttcctgtcatgattaaggcatccgaaggtggtggtggtaaaggtatcagacaagttgaacgtgaagaagatttcatcgctttataccaccaggcagccaacgaaattccaggctcccccattttcatcatgaagttggccggtagagcgcgtcacttggaagttcaactgctagcagatcagtacggtacaaatatttccttgttcggtagagactgttccgttcagagacgtcatcaaaaaattatcgaagaagcaccagttacaattgccaaggctgaaacatttcacgagatggaaaaggctgccgtcagactggggaaactagtcggttatgtctctgccggtaccgtggagtatctatattctcatgatgatggaaaattctactttttagaattgaacccaagattacaagtcgagcatccaacaacggaaatggtctccggtgttaacttacctgcagctcaattacaaatcgctatgggtatccctatgcatagaataagtgacattagaactttatatggtatgaatcctcattctgcctcagaaatcgatttcgaattcaaaactcaagatgccaccaagaaacaaagaagacctattccaaagggtcattgtaccgcttgtcgtatcacatcagaagatccaaacgatggattcaagccatcgggtggtactttgcatgaactaaacttccgttcttcctctaatgtttggggttacttctccgtgggtaacaatggtaatattcactccttttcggactctcagttcggccatatttttgcttttggtgaaaatagacaagcttccaggaaacacatggttgttgccctgaaggaattgtccattaggggtgatttcagaactactgtggaatacttgatcaaacttttggaaactgaagatttcgaggataacactattaccaccggttggttggacgatttgattactcataaaatgaccgctgaaaagcctgatccaactcttgccgtcatttgcggtgccgctacaaaggctttcttagcatctgaagaagcccgccacaagtatatcgaatccttacaaaagggacaagttctatctaaagacctactgcaaactatgttccctgtagattttatccatgagggtaaaagatacaagttcaccgtagctaaatccggtaatgaccgttacacattatttatcaatggttctaaatgtgatatcatactgcgtcaactatctgatggtggtcttttgattgccataggcggtaaatcgcataccatctattggaaagaagaagttgctgctacaagattatccgttgactctatgactactttgttggaagttgaaaacgatccaacccagttgcgtactccatcccctggtaaattggttaaattcttggtggaaaatggtgaacacattatcaagggccaaccatatgcagaaattgaagttatgaaaatgcaaatgcctttggtttctcaagaaaatggtatcgtccagttattaaagcaacctggttctaccattgttgcaggtgatatcatggctattatgactcttgacgatccatccaaggtcaagcacgctctaccatttgaaggtatgctgccagattttggttctccagttatcgaaggaaccaaacctgcctataaattcaagtcattagtgtctactttggaaaacattttgaagggttatgacaaccaagttattatgaacgcttccttgcaacaattgatagaggttttgagaaatccaaaactgccttactcagaatggaaactacacatctctgctttacattcaagattgcctgctaagctagatgaacaaatggaagagttagttgcacgttctttgagacgtggtgctgttttcccagctagacaattaagtaaattgattgatatggccgtgaagaatcctgaatacaaccccgacaaattgctgggcgccgtcgtggaaccattggcggatattgctcataagtactctaacgggttagaagcccatgaacattctatatttgtccatttcttggaagaatattacgaagttgaaaagttattcaatggtccaaatgttcgtgaggaaaatatcattctgaaattgcgtgatgaaaaccctaaagatctagataaagttgcgctaactgttttgtctcattcgaaagtttcagcgaagaataacctgatcctagctatcttgaaacattatcaaccattgtgcaagttatcttctaaagtttctgccattttctctactcctctacaacatattgttgaactagaatctaaggctaccgctaaggtcgctctacaagcaagagaaattttgattcaaggcgctttaccttcggtcaaggaaagaactgaacaaattgaacatatcttaaaatcctctgttgtgaaggttgcctatggctcatccaatccaaagcgctctgaaccagatttgaatatcttgaaggacttgatcgattctaattacgttgtgttcgatgttttacttcaattcctaacccatcaagacccagttgtgactgctgcagctgctcaagtctatattcgtcgtgcttatcgtgcttacaccataggagatattagagttcacgaaggtgtcacagttccaattgttgaatggaaattccaactaccttcagctgcgttctccacctttccaactgttaaatctaaaatgggtatgaacagggctgtttctgtttcagatttgtcatatgttgcaaacagtcagtcatctccgttaagagaaggtattttgatggctgtggatcatttagatgatgttgatgaaattttgtcacaaagtttggaagttattcctcgtcaccaatcttcttctaacggacctgctcctgatcgttctggtagctccgcatcgttgagtaatgttgctaatgtttgtgttgcttctacagaaggtttcgaatctgaagaggaaattttggtaaggttgagagaaattttggatttgaataagcaggaattaatcaatgcttctatccgtcgtatcacatttatgttcggttttaaagatgggtcttatccaaagtattatacttttaacggtccaaattataacgaaaatgaaacaattcgtcacattgagccggctttggccttccaactggaattaggaagattgtccaacttcaacattaaaccaattttcactgataatagaaacatccatgtctacgaagctgttagtaagacttctccattggataagagattctttacaagaggtattattagaacgggtcatatccgtgatgacatttctattcaagaatatctgacttctgaagctaacagattgatgagtgatatattggataatttagaagtcaccgacacttcaaattctgatttgaatcatatcttcatcaacttcattgcggtgtttgatatctctccagaagatgtcgaagccgccttcggtggtttcttagaaagatttggtaagagattgttgagattgcgtgtttcttctgccgaaattagaatcatcatcaaagatcctcaaacaggtgccccagtaccattgcgtgccttgatcaataacgtttctggttatgttatcaaaacagaaatgtacaccgaagtcaagaacgcaaaaggtgaatgggtatttaagtctttgggtaaacctggatccatgcatttaagacctattgctactccttaccctgttaaggaatggttgcaaccaaaacgttataaggcacacttgatgggtaccacatatgtctatgacttcccagaattattccgccaagcatcgtcatcccaatggaaaaatttctctgcagatgttaagttaacagatgatttctttatttccaacgagttgattgaagatgaaaacggcgaattaactgaggtggaaagagaacctggtgccaacgctattggtatggttgcctttaagattactgtaaagactcctgaatatccaagaggccgtcaatttgttgttgttgctaacgatatcacattcaagatcggttcctttggtccacaagaagacgaattcttcaataaggttactgaatatgctagaaagcgtggtatcccaagaatttacttggctgcaaactcaggtgccagaattggtatggctgaagagattgttccactatttcaagttgcatggaatgatgctgccaatccggacaagggcttccaatacttatacttaacaagtgaaggtatggaaactttaaagaaatttgacaaagaaaattctgttctcactgaacgtactgttataaacggtgaagaaagatttgtcatcaagacaattattggttctgaagatgggttaggtgtcgaatgtctacgtggatctggtttaattgctggtgcaacgtcaagggcttaccacgatatcttcactatcaccttagtcacttgtagatccgtcggtatcggtgcttatttggttcgtttgggtcaaagagctattcaggtcgaaggccagccaattattttaactggtgctcctgcaatcaacaaaatgctgggtagagaagtttatacttctaacttacaattgggtggtactcaaatcatgtataacaacggtgtttcacatttgactgctgttgacgatttagctggtgtagagaagattgttgaatggatgtcttatgttccagccaagcgtaatatgccagttcctatcttggaaactaaagacacatgggatagaccagttgatttcactccaactaatgatgaaacttacgatgtaagatggatgattgaaggtcgtgagactgaaagtggatttgaatatggtttgtttgataaagggtctttctttgaaactttgtcaggatgggccaaaggtgttgtcgttggtagagcccgtcttggtggtattccactgggtgttattggtgttgaaacaagaactgtcgagaacttgattcctgctgatccagctaatccaaatagtgctgaaacattaattcaagaacctggtcaagtttggcatccaaactccgccttcaagactgctcaagctatcaatgactttaacaacggtgaacaattgccaatgatgattttggccaactggagaggtttctctggtggtcaacgtgatatgttcaacgaagtcttgaagtatggttcgtttattgttgacgcattggtggattacaaacaaccaattattatctatatcccacctaccggtgaactaagaggtggttcatgggttgttgtcgatccaactatcaacgctgaccaaatggaaatgtatgccgacgtcaacgctagagctggtgttttggaaccacaaggtatggttggtatcaagttccgtagagaaaaattgctggacaccatgaacagattggatgacaagtacagagaattgagatctcaattatccaacaagagtttggctccagaagtacatcagcaaatatccaagcaattagctgatcgtgagagagaactattgccaatttacggacaaatcagtcttcaatttgctgatttgcacgataggtcttcacgtatggtggccaagggtgttatttctaaggaactggaatggaccgaggcacgtcgtttcttcttctggagattgagaagaagattgaacgaagaatatttgattaaaaggttgagccatcaggtaggcgaagcatcaagattagaaaagatcgcaagaattagatcgtggtaccctgcttcagtggaccatgaagatgataggcaagtcgcaacatggattgaagaaaactacaaaactttggacgataaactaaagggtttgaaattagagtcattcgctcaagacttagctaaaaagatcagaagcgaccatgacaatgctattgatggattatctgaagttatcaagatgttatctaccgatgataaagaaaaattgttgaagactttgaaataa

SEQ ID NO: 34 - DNA, 6801 bp, Artificial Sequence
  ACCyl
atgcgactgcaattgaggacactaacacgtcggtttttcagtatggcttcaggatcttcaacgccagatgtggctcccttggtggaccccaacattcacaaaggtctcgcctctcatttctttggactcaattctgtccacacagccaagccctcaaaagtcaaggagtttgtggcttctcacggaggtcatacagttatcaacaaggtcctcatcgctaacaacggtattgccgcagtaaaggagatccgttcagtacgaaaatgggcctacgagacctttggcgacgagcgagcaatctcgttcaccgtcatggccacccccgaagatctcgctgccaacgccgactacattagaatggccgatcagtacgtcgaggtgcccggaggaaccaacaacaacaactacgccaacgtcgagctgattgtcgacgtggctgagcgattcggcgtcgatgccgtgtgggccggatggggccatgccagtgaaaatcccctgctccccgagtcgctagcggcctctccccgcaagattgtcttcatcggccctcccggagctgccatgagatctctgggagacaaaatttcttctaccattgtggcccagcacgcaaaggtcccgtgtatcccgtggtctggaaccggagtggacgaggttgtggttgacaagagcaccaacctcgtgtccgtgtccgaggaggtgtacaccaagggctgcaccaccggtcccaagcagggtctggagaaggctaagcagattggattccccgtgatgatcaaggcttccgagggaggaggaggaaagggtattcgaaaggttgagcgagaggaggacttcgaggctgcttaccaccaggtcgagggagagatccccggctcgcccatcttcattatgcagcttgcaggcaatgcccggcatttggaggtgcagcttctggctgatcagtacggcaacaatatttcactgtttggtcgagattgttcggttcagcgacggcatcaaaagattattgaggaggctcctgtgactgtggctggccagcagaccttcactgccatggagaaggctgccgtgcgactcggtaagcttgtcggatatgtctctgcaggtaccgttgaatatctgtattcccatgaggacgacaagttctacttcttggagctgaatcctcgtcttcaggtcgaacatcctaccaccgagatggtcaccggtgtcaacctgcccgctgcccagcttcagatcgccatgggtatccccctcgatcgaatcaaggacattcgtctcttttacggtgttaaccctcacaccaccactccaattgatttcgacttctcgggcgaggatgctgataagacacagcgacgtcccgtcccccgaggtcacaccactgcttgccgaatcacatccgaggaccctggagagggtttcaagccctccggaggtactatgcacgagctcaacttccgatcctcgtccaacgtgtggggttacttctccgttggtaaccagggaggtatccattcgttctcggattcgcagtttggtcacatcttcgccttcggtgagaaccgaagtgcgtctcgaaagcacatggttgttgctttgaaggaactatctattcgaggtgacttccgaaccaccgtcgagtacctcatcaagctgctggagacaccggacttcgaggacaacaccatcaccaccggctggctggatgagcttatctccaacaagctgactgccgagcgacccgactcgttcctcgctgttgtttgtggtgctgctaccaaggcccatcgagcttccgaggactctattgccacttacatggcttcgctagagaagggccaggtccctgctcgagacattctcaagacccttttccccgttgacttcatctacgagggccagcggtacaagttcaccgccacccggtcgtctgaggactcttacacgctgttcatcaacggttctcgatgcgacattggagttagacctctttctgacggtggtattctgtgtcttgtaggtgggagatcccacaatgtctactggaaggaggaggttggagccacgcgactgtctgttgactccaagacctgccttctcgaggtggagaacgatcccactcagcttcgatctccctctcccggtaagctggttaagttcctggtcgagaacggcgaccacgtgcgagccaaccagccctatgccgagattgaggtcatgaagatgtacatgactctcactgctcaggaggacggtattgtccagctgatgaagcagcccggttccaccatcgaggctggcgacatcctcggtatcttggcccttgatgatccttccaaggtcaagcatgccaagccctttgagggccagcttcccgagcttggaccccccactctcagcggtaacaagcctcatcagcgatacgagcactgccagaacgtgctccataacattctgcttggtttcgataaccaggtggtgatgaagtccactcttcaggagatggttggtctgctccgaaaccctgagcttccttatctccagtgggctcatcaggtgtcttctctgcacacccgaatgagcgccaagctggatgctactcttgctggtctcattgacaaggccaagcagcgaggtggcgagtttcctgccaagcagcttctgcgagcccttgagaaggaggcgagctctggcgaggtcgatgcgctcttccagcaaactcttgctcctctgtttgaccttgctcgagagtaccaggacggtcttgctatccacgagcttcaggttgctgcaggccttctgcaggcctactacgactctgaggcccggttctgcggacccaacgtacgtgacgaggatgtcattctcaagcttcgagaggagaaccgagattctcttcgaaaggttgtgatggcccagctgtctcattctcgagtcggagccaagaacaaccttgtgctggcccttctcgatgaatacaaggtggccgaccaggctggcactgactctcctgcctccaacgtgcacgttgcaaagtacttgcgacctgtgctgcgaaagattgtggagctggaatctcgagcttctgccaaggtatctctgaaagcccgagagatcctcatccagtgcgctctgccctctctaaaggagcgaactgaccagcttgagcacattctgcgatcttctgtcgtcgagtctcgatacggagaggttggtctggagcaccgaactccccgagccgatattctcaaggaggttgtcgactccaagtacattgtctttgatgtgcttgcccagttctttgcccacgatgatccctggatcgtccttgctgccctggagctgtacatccgacgagcttgcaaggcctactccatcctggacatcaactaccaccaggactcggacctgcctcccgtcatctcgtggcgatttagactgcctaccatgtcgtctgctttgtacaactcagtagtgtcttctggctccaaaacccccacttccccctcggtgtctcgagctgattccgtctccgacttttcgtacaccgttgagcgagactctgctcccgctcgaaccggagcgattgttgccgtgcctcatctggatgatctggaggatgctctgactcgtgttctggagaacctgcccaaacggggcgctggtcttgccatctctgttggtgctagcaacaagagtgccgctgcttctgctcgtgacgctgctgctgctgccgcttcatccgttgacactggcctgtccaacatttgcaacgttatgattggtcgggttgatgagtctgatgacgacgacactctgattgcccgaatctcccaggtcattgaggactttaaggaggactttgaggcctgttctctgcgacgaatcaccttctccttcggcaactcccgaggtacttatcccaagtatttcacgttccgaggccccgcatacgaggaggaccccactatccgacacattgagcctgctctggccttccagctggagctcgcccgtctgtccaacttcgacatcaagcctgtccacaccgacaaccgaaacatccacgtgtacgaggctactggcaagaacgctgcttccgacaagcggttcttcacccgaggtatcgtacgacctggtcgtcttcgagagaacatccccacctcggagtatctcatttccgaggctgaccggctcatgagcgatattttggacgctctagaggtgattggaaccaccaactcggatctcaaccacattttcatcaacttctcagccgtctttgctctgaagcccgaggaggttgaagctgcctttggcggtttcctggagcgatttggccgacgtctgtggcgacttcgagtcaccggtgccgagatccgaatgatggtatccgaccccgaaactggctctgctttccctctgcgagcaatgatcaacaacgtctctggttacgttgtgcagtctgagctgtacgctgaggccaagaacgacaagggccagtggattttcaagtctctgggcaagcccggctccatgcacatgcggtctatcaacactccctaccccaccaaggagtggctgcagcccaagcggtacaaggcccatctgatgggtaccacctactgctatgacttccccgagctgttccgacagtccattgagtcggactggaagaagtatgacggcaaggctcccgacgatctcatgacttgcaacgagctgattctcgatgaggactctggcgagctgcaggaggtgaaccgagagcccggcgccaacaacgtcggtatggttgcgtggaagtttgaggccaagacccccgagtaccctcgaggccgatctttcatcgtggtggccaacgatatcaccttccagattggttcgtttggccctgctgaggaccagttcttcttcaaggtgacggagctggctcgaaagctcggtattcctcgaatctatctgtctgccaactctggtgctcgaatcggcattgctgacgagctcgttggcaagtacaaggttgcgtggaacgacgagactgacccctccaagggcttcaagtacctttacttcacccctgagtctcttgccaccctcaagcccgacactgttgtcaccactgagattgaggaggagggtcccaacggcgtggagaagcgtcatgtgatcgactacattgtcggagagaaggacggtctcggagtcgagtgtctgcggggctctggtctcattgcaggcgccacttctcgagcctacaaggatatcttcactctcactcttgtcacctgtcgatccgttggtatcggtgcttaccttgttcgtcttggtcaacgagccatccagattgagggccagcccatcattctcactggtgcccccgccatcaacaagctgcttggtcgagaggtctactcttccaacttgcagcttggtggtactcagatcatgtacaacaacggtgtgtctcatctgactgcccgagatgatctcaacggtgtccacaagatcatgcagtggctgtcatacatccctgcttctcgaggtcttccagtgcctgttctccctcacaagaccgatgtgtgggatcgagacgtgacgttccagcctgtccgaggcgagcagtacgatgttagatggctcatttctggccgaactctcgaggatggtgctttcgagtctggtctctttgacaaggactctttccaggagactctgtctggctgggccaagggtgttgttgttggtcgagctcgtcttggcggcattcccttcggtgtcattggtgtcgagactgcgaccgtcgacaatactacccctgccgatcccgccaacccggactctattgagatgagcacctctgaagccggccaggtttggtaccccaactcggccttcaagacctctcaggccatcaacgacttcaaccatggtgaggcgcttcctctcatgattcttgctaactggcgaggcttttctggtggtcagcgagacatgtacaatgaggttctcaagtacggatctttcattgttgatgctctggttgactacaagcagcccatcatggtgtacatccctcccaccggtgagctgcgaggtggttcttgggttgtggttgaccccaccatcaactcggacatgatggagatgtacgctgacgtcgagtctcgaggtggtgtgctggagcccgagggaatggtcggtatcaagtaccgacgagacaagctactggacaccatggctcgtctggatcccgagtactcctctctcaagaagcagcttgaggagtctcccgattctgaggagctcaaggtcaagctcagcgtgcgagagaagtctctcatgcccatctaccagcagatctccgtgcagtttgccgacttgcatgaccgagctggccgaatggaggccaagggtgtcattcgtgaggctcttgtgtggaaggatgctcgtcgattcttcttctggcgaatccgacgacgattagtcgaggagtacctcattaccaagatcaatagcattctgccctcttgcactcggcttgagtgtctggctcgaatcaagtcgtggaagcctgccactcttgatcagggctctgaccggggtgttgccgagtggtttgacgagaactctgatgccgtctctgctcgactcagcgagctcaagaaggacgcttctgcccagtcgtttgcttctcaactgagaaaggaccgacagggtactctccagggcatgaagcaggctctcgcttctctttctgaggctgagcgggctgagctgctcaaggggttgtga

SEQ ID NO: 35 - DNA, 6732 bp, Artificial Sequence
  ACC1ch
atgagcgaagaaaacctgttcgaggacgccgccgcaaagcgccagtacgagataacagactactccaccaagcacaagaccctcgcgtcccacttcgtcggcctcaacaccctcgagcgcgtcgaggagtcccccctcaaggacttcgtcaagtcccacggcggtcacaccgtcatctccaagatcctcatcgccaacaacggtatcgccgccgtcaaggagatccgctccgtcagaaagtgggcctacgagaccttcggcgatgagcgcaccgtccagttcgtcgccatggccacccccgaggacctccaggccaactccgagtacatccgcatggcggaccagtacgtcgaggtccccggcggcaccaacaacaacaactacgccaacgtcgacctcatcgtcgacgtcgccgagagaaccgacgtcgacgcagtctgggccggctggggccacgcctcagagaacccacacctcccagagaagctcgccgcctcaaagagaaagatcatcttcatcggtccacccggcagcgccatgcgctccctcggtgacaagatctcctccaccatcgtcgctcagcatgccaaggtcccatgtataccttggtccggcaccggcgtcgacacagtccacctcgacagcgagaccggcctagtgtccgtcgacgacgacatctaccagaagggctgctgctcctcccccgaggacggcctcgccaaggccaagaagatcggcttcccagtaatgatcaaggcctccgagggtggtggtggtaagggtatcagacaggtcgagcgcgaggaggacttcatcgccctgtaccaccaggccgccaacgagatcccgggctccccaatattcatcatgaagctcgccggcaaggcccgccacctggaggtccagcttctcgccgatcagtacggtaccaacatttccctgtttggccgtgactgttccgtgcagagacgccaccagaagatcatcgaggaggcgccagtgactatcgccagcaacgagacattcgagaagatggccagcgcagccgtcagactcggtaagctggtcggctacgtctccgccggtaccgtcgaatacctatattccagcgaggagaagaagtactacttcctggagcttaatccaagactgcaggtcgagcacccaaccaccgagatggtctccggtgtcaacctgccttccgcccagctgcagatcgccatgggtatcccaatgcacagaatcagcgacatcagagtcctttacggtatgaaccctcacggcgccaccgagatcgacttcgagttcaagactgaggaggccaagaagactcagagaaagcctgttccaaagggccattgtaccgcttgtcgtatcacttccgaggatccaaacgagggtttcaagccttccggtggttccctacacgagctgaacttcagatcttcttcaaatgtctggggttacttctccgtcggtaacaacggtggtatccactccttctccgactcccaattcggtcacatcttcgccttcggtgagaacagacagatgtcgagaaagcacatggttgtcgccctaaaggagctgtccatcagaggtgacttcagaactactgtcgagtatctgatcaagcttctagagactgaggatttcgaggagaacactattactaccggttggttggacgacctgatctcgcacaagatgaccgcccagaagccagatgctacgcttgccgtcatttgtggcgctgctaccaaggctttcatcgcgtcagagtctgccagaaaggaatacattaaccagctcaagagaggtcaggttccaccaaagggcctactggagactatgttcccaattgaattcatccacgagaacaagagatataagttcactgttgccaagtctgctgacgattcctacacacttttcatcaatggttccaagtgcgaggtccgtgctgttaagctatctgatggcggtcttttgatttctgtcggcggccaatctcacactatctactggaaggaggaagcccaggctaccagactttcgatcgactctatgactactctacttgaggttgagaatgatcctacacagctgcgcaccccatccccaggtaagcttgtgaagttccttgttgagaacggtgaccaaatcaaggtcggccagccatacgctgagattgaggtcatgaagatgcaaatgccattggtttctcaggagaacggtgttatccagttactaaagcagccaggttctaccattgacgctggtgatatcattgccatgcttgcgctagacgacccatccaaggtcaagcacgctatgccatttgagggtatgcttccagagctaggctctccaatggttgaaggtaccaagccagcctacaagttccactccctagtgtccacgcttgagaatattctaaagggttacgacaaccaggttatcatgaacgcatctctacaacagctaatcgaggttctcagagacccaagactaccatactctgagtggaagttaaatgtatctgcgctacacaccagacttcctcttgctttggacgagaagttggacaagctggtcgagcgttctgctaaccgcagtgctatcttccctgctaagcagctacagaagatgatcgatgatgctgtgagagacccacaagctgacccactattgtcatccattgttgagccactccttgacattactactcgttatgccaatggcctagaggcacatgaacattccgtctttgtcaagttcttagaggagtactacaacgtcgagaagctattcagcgagcacggtgagcgtgctgagaatgtcatcctaaagctacgtgacgagaacatcgatgacctagacaaggttgttctcattgttctctctcatgccaaggtttctgccaagaacactctgatcctagctattctgaagcactaccaaccaatttgcaaaatgtcttcgtctgttgcccatatcttcaccaagccacttcagcacattgtcgagctggagtccaagcctgctgctaaggttgctctacaggccagagaaattctgatccagggtgccctaccatctgtcaaggagagaacagagcagattgaacacattctaagatcttctgtcacaaacacttcttatggtgactcttcgccaaaggtcagtgagccaaacatggaaatactgaaggatctaattgactccaactatgtcgtttttgatgttctactcccattcctgtgtcacgaagaccctgttattgctactgccgctggtcaggtttatgttcgccgtgcttacagagcttacaccgttggtgaggttaagtcacacagcattactgactcttccatgaacccattgattgagtggaagttccagctaccctctgctgctttctcttccattccacagctgaagagcaagattggtatgaacagagctatgtctgtttctgacttgtcctacgttgttgacagtgagcacgctccactgagaactggtatattggttgctgctgaacatctagatgaggttgacgccagccttgcacagggcctagaggttatcccagagcactccgctccaggcaatggtccagctccagacagatctggcagttcctcctctttgagtaacatcgttaatgtctgtgttgccagcacagaaggattcgattccgaaaaggagattcttgccagagtgaacgagatcctagagctgaacaaggctgatctaatcaagtcttccatccgtcgtatcactttcatgttcggtttcccagacggtacttatccaaagtattacactttcaatggtccaaactaccaggagaaccagacgattcgtcacattgagccagcttgtgcgttccaactagaattaggaagaatgtctaacttcaacatcactccaatcttcactgacaacagaaacatccacgtttacgaagctgtcagtaagacttctgcactagacaagagattcttcactagaggtataatcagaaccggtcgcattcgtgacgagatttccattcaagaatatctgacctctgaagctaacaagctgatgagtgacattttggacaacctggagatcatcgacacttcgaactccgacttgaaccacatctttatcaacttttctgctgtctttgatgtgtctccagaggatgtcgaggctgcctttggtggcttcctagaaagattcggtaagagattcctaagactacgtgtctctgctgctgagattcgcatcattatccaggacccaaagactggtgcaccagtgccattgcgtgccctgatcaacaacgtctctggttatgtcgtgaagtctgagctatacaccgagatcaagaatgccaagggtgagtgggtctttaagtctctcggtaagccaggttctatgcatctgagaccaattgctactccatacccagttaaggagtggctacagccaaagcgttacaaggctcacctaatgggcacaacttacgtttacgatttcccagagctcttccaccaggctgctatcactacatggcagaagtacaagaccaactcttctcaaaaggatctaaccacaatgaaggagagagatgatctgtttatttcccacgagctgattgaggatgagagcggtgaactcactgaggttgagagagaacctggtgctaattcaattggtatggttgccttcaaggtcaccatgaagactcctgagtacccaagaggccgtcaatttgtcattgtcgctaacgatatcacctataagattggttcctttggtccacaagaggacgaattcttcaacaaggttaccgagtacgccagaaagagaggtattccaagaatctatctagctgctaactctggtgctagaatcggtattgctgaggagcttgttccactataccaggttgcctggaaggacgctgatgttccagcgaagggtttcgagtacatctacctgaacaaggatgaaatggagactctaaagggtcactccaaggagaactctgtcatcaccgagcgcatcgtcgaggacggtgaggagagatttgttatcaaggctattattggtgctgacgacggcctaggtgttgagtgtttgagaggttctggtttgattgctggtgcaacttcgagagcctaccaggacattttcactattactttggttacctgcagatccgttggtattggtgcttatctagtcagacttggccagagagctattcagattgagggtcagcctatcatcctaactggtgctcctgccatcaacaaggttctaggtagagaggtctactcctccaacctccaactcggtggtacacagatcatgtacaacaacggtgtttcccacttgactgcctctgacgatcttcaggcggttgagcagatcattaagtggttgtcctacgtccctgcaaagcgcaacatgccagttccaatcctagagaacggcgataagtgggacagacagattgactacagaccaactgttaatgagcagtatgatgttcgctggatgattgagggtcgcgaactagaagacggtaggtttgaatatggtatgttcgacaagggttctttctttgagactctgtcgggctgggctaagggtgtcgttgtcggccgtgcccgtctaggcggtattccaatcggtgttattggtgtggagaccaggaccatcgagaacgttatcccagcggaccctgccaacccagactctactgaggctgttgttcaggaagccggtcaagtgtggtaccccaactctgctttcaagactgctcaggccatcaaggactttaaccatggtgagcagctgccgctaatgattctagccaactggagaggtttctctggtggtcagcgcgacatgtacaacgaggttctgaagtacggttctttcattgtcgactccttagtggactacaagcagccaatcttcatctacattccaccaaccggtgagttgcgtggtggttcttgggtcgttgttgaccctactatcaacgccgaccagatggagatgtacgccgataaggactcccgtgctggtgttctagagccaagtggtatggttggtattaagtaccgtcgcgagaagctactggctacgatgaccagactcgacaccacttaccgcgaactaaaggagcagctatccgacaagacgctaacccctgctcaacaccaggaggtatctgtgaagcttgctgagcgtgagaagttcctactaccaatttacactcaggtaagtgttcagtttgctgatctgcatgaccgctcttctcgtatggtgaagaagggtgttatccgtgctgagctgacgtgggaggagtcccgtcgcttcttcttctggagactgagacgcaagcttgacgaggaatacctcgttaagcgtctggacattgagttgcctcacgcatcgcgtctggaaaagctggcgcgtctgcgttcatggtacccagcctctatcgatgagaccaaggaccgtgatgttgtgacatggattgaagagaactacaatgtgtttgaggaggagttcaaggccttgaagcttgagtcttttgcacaggagcttgccaagagcatgcgtactgatcacgatgttacgatgcgcggtctcgaggagattgcccgcatgttgtctaaggaggacaaggagaggctgctgagtgcgctaaagtaa

SEQ ID NO: 36 - DNA, 3690 bp, Artificial Sequence
  HPDH-MCRbs
atgaccgctggtaaaggtaaaggtgctaaagttgaccctgctggtggtaaagccgctactggtagattggccggtaaagttgcattggtcacaggtgcagctggtaatttgggtggtgccattattagaagattcattgccgaaggtgcaactttggttatgactggtagaactaaggaaagattagctgcagcaaagcaagctttattggacgaaactggtgttgaagaagcaagagtttttaccgtaatcttggatggtgctgatccagattcagttagagcaggtattgatcaagtcagagctgccttaggtagaattgatgttttggtcaataatgcaggttcagctggtcctagacaaacattggaaaacgtaccattgactagagccgaaatggaagcaaatggtgactcagaaacagtagctgacgccatgagaaatttgttgggtgtcagttggaacttaacaagagcagctgccccaataatgccagtaggtgcatcagtcgttaatatttccaccatcttctctcacacaagatactatggtagaacagcctatgtcgttcctaaggctgcattaaacgccttatcccaagaattagcaaaggaattaggtgcatctggtataagagtaaatacagttttcccaggtccaatcgaaagtgaaagaattagaacagttttcgcagctatggatgccttgcaaggtgaaccagaaaactctactgcaaatcatttcatgggtagaatgacattggaaagagctatcggtgacgcccctaaaagaaagactttgccagttccaggtgacattgcagatgcttgtttgtttttagcatcagatgaaagtgctgccttaaatggtaacgaaatagatgttacacatggtatgcaagttagaaaagatagtagatcaacttacatgactagaccatccatgagatctttggacggtgcaggtttgaccgtcttaattgccgctggtgaagcatgggaagatgcattagatatggctaagatccaagctgcatgtggtgccagagtcttattgggtatgactagacaagttgacgtcgcacaagccgaagccagagttaaagctcaaggtgctgaagaaggtttaaccatcatgagattcaacagagctgaacctgatggtatggaagcagccataagagcctattctgatgcacatggtgcaatccactctgccatcgttttacctgtaaagccagctggtcatttcggtgactctttggttgaagcttcagatgcagaagttgacgctttgattgatatcgaattaaccggtgctattgcagttgccagaaccttgagaagatactggaaaacatgctctgacttgatgcaagatccaagattcgtctttatgtcaggtccatctgatggtaaaggtaacaaagcaggtagaatattagcagccgcaatagcccaattaatcacaatttggagagatgaatctagagtagactttgcacaaggtagacaaaagagagccgcatggggtaatcaaatagttagatacacaaatgaagaagatgaaaacaccagattcgccgcaggtcatgctactagaattgttttcaaggaacaaaagataactgaaacttccttgtacttgcctgccaacattggtgaagaaactggtgctagaagagctatgttaggttttgccgaaaatatcactggtttgcatttgggtaaagtcgccatgattacaggtggttctgcaggtattggtggtcaagttgccagattattggcattggctggtgccaaagttatgatggtagctagaagagcaagtgaattggaagccgcaagagaaagaatagttggtgaattgcaagatgttggttttagtggtgttgaaagaagagttaaaatcatggcagatgttgacgtatccgactttgattctttaagaagagctgccgatgcaactatggcagaatttggtagaatagactacttgattaataacgctggtgttgcaggtgctgaagatatggttattgacatgtcattggatatgtggagatggacattggacgccaacttgatttcaaactatttgttaatgcactatgttgtcccaattatgaagagacaaggttccggttatatcttgaatgtttcttcctacttcggtggtgaaaagtttttggcagttgcctatccaaacagagctgattacgcagtctctaaagccggtcaaagagcaatggttgaatccttctcaagatttttgggtccagaaatccaagttaatgcaattgctcctggtcctgttgatggtgacagattgtcaggtactggtggtaaaccaggtttattcttgagaagagccagattaatcttggaaaacaaaagattgaatgcaatctatgctgcagttatcgaatcaataagagaaggtgcagaagttacacacgttttgggtagattagccagaaacgataccggttacttgtcacacgacagatccacccctgacccattgagattattatgtttggaattagccagagaaggtgacggtatttgcacatgggacagatacttattgacacctgatattgcaggtagattgttaatgagattggcctcagcaggttacttattggcacatgaagaatggcaacaaagaagtgcatcagcagaaggtagaactggttggttattggcattaccacctgacgatatgccatatttgcctcaagaaagaatcggtaaagaagcagataaagtcggtagaggtgttttgagtcaattacatttgggtgcaatgccaaaggaatcagaagttgcccaagcaacagtattttacttggctgatagagcagtttccggtgaaacattcatgccttctggtggtttgtccgtagaaagatcctacaccgaaagagaaatgtttggttcccctaaacaagaaagattggaacaaatgaagggtaaaacagtatgggtcatcggtgaacacttagccgattatatcgccgaaactgcaaatcacttaatcggtggtttaggtgttgcaagattggtcttattgacaagatctgaagccggtggtgcttcagttttggctttgttagaccctgaaatcgcagaaagagttaccgtcagattgtgtggtgcagatgtagaatcagctatggatcaagctttaacagacttcggtagacctaccacagtagttagtactcctatggcaggtttaccagacagattgtttgaagatggtgcaatgttagaaccagaagagtttagaactttgtgcgaagaaaatttgacacaacactttagagtttccagaaaggcatccttatatgatggttgccaattggttttagtatcaccagatgtcccatttggtcaatccggtcctgcctttgcattagccaacttcgtcaagacaactttgcatgctttcaccgcaactttagctgtagaaaacgaaagattagttcatgatgttcctaccaatcaaatcaacttgaccagaagagtaagaagtgaagaaccaagaaacgctgtagaacaccaagaagaattgaagagatttgctagagcagttttgttggttggtgcacctttgccagatgcccaagattccagatacagagcaagaatctacagaggtacaagtatgacagtttaa

SEQ ID NO: 37 - DNA, 3663 bp, Artificial Sequence
  HPDH-MCRca
atgagtggtacaggtagattggctggtaaaatagcattgataacaggtggtgcaggtaatataggttccgaattgacaagaagatttttggctgaaggtgcaactgttatcatatcaggtagaaatagagctaaattaactgctttggccgaaagaatgcaagcagaagcaggtgttccagctaaaagaatcgacttagaagtcatggacggttccgatcctgtagctgttagagctggtatagaagctattgttgcaagacacggtcaaatcgacatcttggtaaataatgctggttctgcaggtgctcaaagaagattggctgaaatccctttgactgaagcagaattgggtccaggtgctgaagaaaccttgcatgcttctattgcaaacttattgggtatgggttggcatttgatgagaatagctgcacctcatatgcctgtaggttctgccgtaattaacgtttccaccatattctcaagagcagaatactatggtagaatcccatatgttaccccaaaagcagccttgaatgcattgtcacaattggctgccagagaattgggtgccagaggtatcagagttaataccatctttccaggtcctattgaatccgatagaatcagaaccgtatttcaaagaatggaccaattgaagggtagacctgaaggtgacacagcacatcatttcttgaataccatgagattgtgtagagccaatgaccaaggtgcattagaaagaagatttccatcagtaggtgacgttgcagatgcagctgtatttttagcttcagctgaatctgccgcattgtctggtgaaaccatcgaagtaacacatggtatggaattgccagcttgttctgaaacatctttgttggcaagaacagatttgagaactatagatgcatctggtagaacaaccttaatatgtgctggtgaccaaattgaagaagttatggctttgactggtatgttaagaacttgtggttctgaagttattataggtttcagatccgctgcagctttggcacaattcgaacaagccgttaatgaatctagaagattggcaggtgctgattttacccctccaatcgctttaccattggacccaagagatcctgctacaattgatgcagtttttgattggggtgcaggtgaaaatactggtggtatccacgcagctgttatcttgcctgcaacctctcatgaaccagccccttgtgttatagaagttgatgacgaaagagtcttgaacttcttggctgatgaaatcacaggtactatcgtaatcgcttctagattggcaagatactggcaatctcaaagattgacaccaggtgccagagcaagaggtccaagagtaattttcttgtcaaacggtgctgatcaaaatggtaatgtatatggtagaatacaatcagctgcaataggtcaattgatcagagtttggagacacgaagctgaattggattatcaaagagcttctgctgcaggtgaccatgtattgcctccagtttgggctaatcaaatcgtaagattcgcaaatagatctttagaaggtttggaatttgcctgtgcttggaccgctcaattgttacattctcaaagacacatcaatgaaatcaccttgaatatccctgctaacatctcagcaaccacaggtgcaagatccgcttcagttggttgggccgaatctttaataggtttgcacttgggtaaagttgcattgatcacaggtggttctgctggtatcggtggtcaaatcggtagattattggcattgtcaggtgcaagagtaatgttagcagcaagagacagacacaagttagaacaaatgcaagccatgatacaaagtgagttagccgaagtaggttacactgacgtagaagatagagtccatatagcaccaggttgtgatgtctcctccgaagcccaattagccgatttggttgaaagaactttgtccgctttcggtacagttgattatttgattaataacgccggtatcgctggtgtagaagaaatggttatagatatgccagtcgaaggttggagacatacattattcgcaaatttgatctccaactacagtttgatgagaaagttggctcctttgatgaaaaagcaaggttctggttacatcttgaatgtttcttcatactttggtggtgaaaaagatgctgcaattccatatcctaacagagcagactacgccgtatcaaaggcaggtcaaagagctatggctgaagtttttgctagattcttaggtccagaaatccaaattaatgcaattgccccaggtcctgttgaaggtgacagattgagaggtactggtgaaagacctggtttgttcgctagaagagcaagattaatcttggaaaataagagattaaacgaattgcatgccgctttgatagcagccgctagaacagatgaaagatctatgcacgaattagtagaattgttgttgccaaatgacgttgcagccttggaacaaaacccagctgcacctactgctttaagagaattggcaagaagattcagatctgaaggtgacccagctgcttcttcttcttctgcattgttgaatagatcaattgcagccaagttattggctagattacataacggtggttatgtattgccagccgatatatttgctaatttgccaaacccaccagatccatttttcacaagagcacaaattgatagagaagccagaaaagttagagatggtataatgggcatgttgtacttgcaaagaatgccaactgaatttgatgttgctatggcaacagtctattacttagctgacagaaatgtttctggtgaaacttttcatccatcaggtggtttgagatatgaaagaactcctacaggtggtgaattattcggtttgccatcccctgaaagattagctgaattggtcggtagtaccgtatacttaattggtgaacatttgactgaacacttgaatttgttggccagagcttatttggaaagatacggtgcaagacaagttgtcatgattgttgaaaccgaaactggtgctgaaaccatgagaagattattgcatgatcacgtcgaagccggtagattgatgactattgtagctggtgaccaaatagaagctgcaatcgaccaagctattacaagatatggtagaccaggtcctgtagtttgtacaccttttagaccattacctaccgtccctttggtaggcagaaaagattctgactggtcaaccgttttatctgaagccgaatttgctgaattatgcgaacatcaattgactcatcacttcagagttgcaagaaagattgccttgtccgatggtgcaagtttagccttggtcaccccagaaactacagcaacttccaccactgaacaattcgcattggccaacttcatcaagacaaccttgcacgctttcacagcaaccatcggtgtcgaaagtgaaagaactgctcaaagaatcttaattaaccaagtagatttgacaagaagagctagagcagaagaaccaagagatccacatgaaagacaacaagaattagaaagattcattgaagctgttttattggtcacagcaccattgccacctgaagccgataccagatacgctggtagaatacatagaggtagagctataacagtttaa

SEQ ID NO: 38 - DNA, 3660 bp, Artificial Sequence
  HPDH-MCRcag
atgtccgtcacaggtagattggcaggtaaaatagccttgataacaggtggtgctggtaacataggttcagaaatgactagaagattcttagccgaaggtgcaactgttattatctcaggtagaaactcagctaaattggccgctttagcagaaagattgagatccgaagcaggtgttcctgctaagagaatagatttggaagttatggacggttcagatccagctgctgttagagcaggtgttgcagctatcattggtagacatggtcacatagatatcttagttaataatgcaggttccaccggtgcacaaagaagattggctgaaatcccattaaatgaaaccgatagagacttagacgatgaagaagctttgtctacaagtgttgcaaatttgttgggtatggcttggcacttaatgagaatcttaagtcctcatatgccaccaggttctgctattataaacatctccaccatcttcagtagagctgaatactatggtagaatcccttacgtcgttccaaaggcagccttgaatacattgactcaaatcgctgcaagagaattgggtatcagaggtatcagagttaacacaatctttccaggtccaattgaatccgaaagaatccaaacagtttttcaaagaatggaccaattgaaaggtagaccagaaggtgacacagcatcacaattcttggcaactatgagattatacagagctaacgatcaaggtcaattggaaagaagattcccaacaatctgtgacgttgctgatgctgcagttttcttggcctctgatgaagcagccgctttgacaggtgaaactatcgaagttacacatggtatggaattgccaacatcttcagaaacctctttattggctagaacagacttaagaactattgacgcaaatggtagaaccactttgatatgtgccggtgaccaaatcgaagaagttatggctttgactggtatgttgagaacttgtggttctgaagtcattatcggttttagaagtgaagctgcattggcacaattcgaacaagccatcggtgaatctagaagattggctggtgaatcctttatcccacctattgcattaccaattgacttgagaaacccaagtacaatagacgcattatttgattgggctggtgaaaatactggtggtattcatgcagccgtaatcttgccagcatcaggtagagaacctgcaacacaagttatagacatcgacgatgctcatgtccaagccttcttaaacgatgaaatcgtaggttccatcattatcgcatcaagattggctagatactggcaagcacaaagaatcgcacctggtgccagagcaagagaacctagagtcatcttcttgtctaatggtgcatcaactgctggtaatccttacggtagaatccaatccgcagctatagaacaattaataagagtttggagacatgaagcagccttggattacgaaagagcaaccgctgcaggtgaaagagttttgcctgcagtttgggcatcacaaatcgttagatttgcaaacagatccttagaaggtttggaatttgcctgtgcatggaccgcacaattattacattcccaaagaagaattaatgaaataacattaactatccctgccgacatctctgctactacaggtgctagaagtgccagtgttggttgggctgaaagtttgataggtttacatttgggtaaagttgccttgattactggtggttccgcaggtataggtggtcaaataggtagattattggctttgtccggtgcaagagttatgttagccgcaagagatcctcacaagttggaacaaattcaagccacaattagagcagaattagcagaagtcggttataccgatgtcgaagaaagagttcaaatcgctccaggttgcgacgtttcatccgaagaacaattagttgacttagttgaaagaacattagcagcctttggtacagttgactatttgatcaacaatgctggtatagctggtgtagaagaaatggttatcgacatgccagttgaaggttggagaaacacattgtatgccaatttgatctcaaactactccttgatgagaaaattggcacctttgatgaagaaacaaggttcaggttatgttttgaatgtttcaagttacttcggtggtgaaaaggacgcagcaatcccatacccaaacagagctgactatgctgtctcaaaagcaggtcaaagagcaatggcagaagttttcgctagatttttgggtccagaaatccaaattaatgctatagcacctggtccagtagaaggtgacagattaagaggtacaggtgaaagacctggtttatttgcaagaagagccagattgatcttggaaaacaaaagattaaacgaattacatgccgcattgatcacagcagcaagaacagataatagaccaatgagagaattggtagaattattattacctaacgatgttgcagcattggcacaacatcctgctgccccagatgttttgagaaccttggcaaagagatttcaatccgaaggtgaccctgctgcatcatcctcttctttcttattgaacagaagtatcgctgcaaaattgttggcaagattaattaatggtggttacgatttgccagcagatatcttcgctaacttggcagtcccacctgatccattctttacaagagcccaaatcgacagagaagccagaaaagtcagagatggtataatgggtatgttatatttgcaaagaatgccaacagaatttgacgttgcaatggctaccgtatactacttggcagacagaaatgtttccggtgaaaccttccatccttctggtggtttgagatacgaaagaacaccaacaggtggtgaattgttcggtttacctgctccagaaagattagccgaattggttggttccactgtctatttgatcggtgaacacttgactgaacacttaaacttattggcaagagcttacttggaaagatatggtgccagacaagttgttatgatcgtagaaaccgaagcaggtgccgaaaagatgagacacttattacatgatcatgttgaagcaggtagattaccaatcatagtagcaggtgaccaaattgaagctgcaatcgaccaagcaatagctaattatggtagacctggtccagttgtttgtactccattcagaccattaccttccgccccattagttggtagaaaggattcagactggtccaccgtattatcagaagctgaatttgcagaattgtgtgaacatcaattgactcatcattttagagtcgcaagaaagatagcattgtccgatggtgcatcattggccttagttacacctgaaactaccgcaacatcttcaacagaacaattcgccttagccaacttcgtcaagacaactttacatgccttcaccgccactatcggtgtcgaatcagaaagaactgcacaaagaattttgatcaatcaagtagacttaaccagaagagcaagagccgaagaaccaagagatccaagagaaagacaacaagaattggaaagattcatcgaagcagttttattagttactgctcctttaccacctgaagcagacactagatacgcaggtagaatacatagaggtagagccatcactgtttaa

SEQ ID NO: 39 - DNA, 3696 bp, Artificial Sequence
  HPDH-MCRct
atgagaagaacaaaaccagaatgcttgagaagaaatgaaagtacaatgagattgaacggtaaagtcgccttaataacaggtgccgcaggtggtatcggttcagtagtcacaagaatgtacttgagagaaggtgctagagttgcaatttcctcaagatccttggaaagagcagaacaattcagagcagccttaatggccgaaggtttttcaggtgacgatattttgccagtagcatttgccagtacagacttagccggtatgcaaacagctatcgaagcaattgcagctagatggggtggtttggatgttttaattaacaatgctggttcagctggtgcaaagcaacctttgttcagaatccctttcacctcagaagatttggctcaattggcagctgaaggtttcacagaaaccgaaacaatgagagaaagtgctgccaacttattgggtatgccttggcacttaacaagattggctttaccttacttgagagttggtgcttctattatcaatgtatctacaatcttctcaagaaccaattattatggtagaataccatacgtagtcccaaaatctgccttgaacgctttatccttgggtttggccaaacaattgggtaccactgacagagctgtcagagttaataccgtttttccaggtccaatagattcagacagaatcagaaccgttttcggtgctatggacagattgaaaggtgtcccagaaggtactaccgctcaagaatttttcgacattatgattttggctagagcaagaggtggtgaagcacctacaaagtgttatccaactcaagctgatgttgctcacgtaattttatttttgggttcagatgaatctgcagccatatctggtcataactttgaaataactcatggtatgcaagttaaggcacaatccagaacaaaattgactgcatggccagaccaaagattgatagatttgtcaagaagagttgtcttgattgttggtggtgaacaagtacatgatgctgtcacaatagcagcctcccaacaatcatatggtgcttcagttatcttgacattcagacaaccagaagcagttaatactgcaaaagctcaattggaatccagaggtttgaaccattctatagcagttacctggttagacccattgagaagagaatctgttacaagtgttttcgacttaatcagagaaagataccacagattggataccgttatagtttttccagctcatgccgctggtcattatggtcctgaattgatcccagatgaacctgaaagaatcagacaattcaccgatgaagctattttaggtacaaccgcattcgcagctcaattgtccagatttttattggctttcgatgcagaaaacgaattgcaagaacctgtcaacgttttgtttgtcacaaacgaacacgacggtgctacaaatgcatttgaagatatctatagagccgcagtcgaacaattgttgagagtttggagacacgaagatgaattgcaagttgcagctggtacaagaagattcgccgtaagaaccaaccaaatagtaagatatgctaatgcagaaccagacaacttgaagtttacagccgattggttggcaacattagccaacagagtcagaatctttgatgaattaaacttatacgtccctgaaaacatacaaagaaccaccggtaaaactgaattgccaagagatattgccagaactttattaggtttgcacataggtaaagttgcagtaataacaggtggttcagctggtataggtggtgctataggtcattacttagctttgtcaggtgcaaaagtagttttggctgcaagagatgctgaaagattggctgcattgaaaagagaaatcgttgcagaattatttgccgttggttaccctcaaccagaaaccagagttgaaaccttggctaatatagacgtagctgatgaagaagctttgggtagattagtaaaattcgctttggataaatttggtagaatagacttcttgataaataacgcaggtattgctggtgccgaagaaatggttgtagacttgccattggcagcttggagacatactttgaaagcaaatttgttaagtaattactccttgatatacaagatagcacctttgatgaaaaagcaaggtgcaggttatatcttgaatgtatcatcctacttcggtggtgaaaagtacgttgccgttgcatatccaaatagatccgattacgctgtttccaaagctggtcaaagagcattggctgaaatcttggctagacacttgggtcctgaaatccaaattaatgctttatccccaggtcctgttgaaggtaaaagattaagaggtgaaggttctagacctggtttatacgccagaagagcaagattgatcttggaaaataagagattgaatgacatccatgatgctgttatcagagcatggagagaaggtgaagctgttaaatccaccttgggtgcattggctcataatcatttcgaagatgttttagctgcaggtccaccagaacctgttagaagattaattacccatttgagagctgcagctgtcaacgaaggtcattcagattcccattacttgatgaccagaaaaatcgctgaaaagttgttgcacagattgttcgaaggtggttacttgacatcagtcgaagatagagaagcttttaccttagctttcttgagagaattaccagaacctccagatccatttttcgatccaaaagaaattgatagagaagctgaaagagttcaatctggtatcttgactatgttgaatttgagaagaatgcctacagaagaagaaatcgctatcgctacagttttctacttgtctgatcctaacatttctggtgaaaccttgcacccatcaggtggtttgaaattcgacagaacagtaaccgaaggtgaattttatggtttaccaagaaatgaacatttgatggaattaagaagaaagaatgtattgttaatcggtgactacttggaagaagaattgagatggttggtcggtgctttcgcaatccaattagttgtaagaaattgtatcattttgacaaagaccgccgaaagagctgatagtttgagacattacttttctgcacaaagattgaacaatttgcatatcttctctgctggtgcaaacgttgaagccgctatggatgacttgataagaagatttggtcacttggatgtcgtagtatccacaccttttgaccctttaccattgaaacctttggctgcaactgatgattggagaggtgtcttgaatgaaaaagacttcgaacaattggttgaaacacatattactcatcacttcagagtcgccaaaaaggctgccttgcaagataaatcccaaatcgtattagtaacccctaagacatcaagaaatagttccagagaagaatttgctttagcattgttcgttaaaacaaccttacatgcattgacagctaccttggcagttgaatgcgaaagattcacccatcatcctactgtaaatcaagttgatttgacaagaagagctagagtcgaagaaccaagaaacgaaagagaagaaagagaagaattggaaagattcgtagacgctgttttattggctgccgcaccagctcctgaaccagaacaatccagatacttgtccagaatacatagaggtaacgccatcactgtttaa

SEQ ID NO: 40 - DNA, 3651 bp, Artificial Sequence
  HPDH-MCRgb
atgaacgatatgtccgatattccacaagacttattaacacaaagtatagcaggtagaagattagataacaaatgtattattttaactggtgcagctggttcaatcggttcctttattacaagacaattattgagagaaggtgcaagagttatgttaacaggtagagatcaatcaaaattggacgactttattggtgacttggtatcagaaggtttcgaagaaactttcatggtttccgcaactggtgactgtgccgatcctgaagtctgtagagaaatagttgccaagacagttgccgcattcggtcctattgatgttttagtcaacaatgccggtgccgcaggtccaaaattcacattgagagatatccctttcaccgaagcagaacaaagagcagctgactcagatcaaacaatgtttgactcagccatgaatttgttgggtgctccttggaatatggccagagccgctgcaccacatatgtcagctggtgcctctataatcaacgttagtactatcttttctagaactcattactatggtagaataccttacgtcgttccaaagtctggtttgaacgcattgggtaaaggtttggcattagaattgggtgaaaaacaaggtatcagagtaaacactttatttccaggtcctattgaatccgaaagaattgaatcagttttcgccagaatggatgaattgcaaggtgttgaacctggttcaactggtaaagagtttagagatttgatgataactacaagaacctctgatggtggtttggaatataaatacccaactccaacagatgttgcatcaggtatcgtttggttggcatctgatgaatcctcagccttatctggtcatcacattgaagtcaccaatggtatgcaagtaccagcacaatctagatcccaattggtttcatggccagataagagattggaagatttgtcaggtcaagtcgttttgattttaggtggtgacgactatcaagaagcagttactttcgccgaaagacaaatccaatccggtgcaagagtaatgttagctttcagaaacttgaataccgttggtcatgctagatcattagttcaatcaagaaatttgggtgacgttcaattatcccacttggaccctttgagaagagaatcagttgacagatccatgcaattaatcgcagatcactttggtagattagatggtgtaatcttgttaccacaaaagccaaacggtgaatacggttattccttgactacagctaatgacgaagatgttgccaattttgttagagatgaagttgtcgcccctgttgcatttgcatccgctttcgcaagaaacatggatcaattgtttgccgaaggtgaaccaccagccatcgtttacgttactaaccctagtgatagacatggtaacttgatgaatgaaattatcagagcaagtgttgaagccttaatcagaggttggagacatgaagatgaaactttggcaaacactggtgaattgccttgggcagtacaaccaaaccaaatggttagatatgataccgaagatagagaagctttaactttcgcagccgactgggcagccactttaaccaacagagttagaaagatggatagtatcaacttatggttaccaagaagtattaaaagatccactggtaaaagtagtatgccaagtagtataagtagagtattgcctggtttgcacaagggtagaacagccgtaatcactggtggttccttaggtattggtttacaattgggtagatttttggcaatagctggtgccagagtcttgttatctgccagaagtgaaggtaaattggccgaagcaagagatgaaatcgttgacgaattgagaaacataggttatcctagaccagaatctagagttacaattttgggtggtatcgacgtaggtgaccctgatgcattggatagattacacgatcatgccgttgcagaattgggtcacgtagatttcttgattaataacgctggtatcagtggtgccgaagaaatggtagtcgatatgaccagagcagactgggatagaactatggaagccaacttgatctctaactactcattgattagaaaattctcacctgccatgaaagcaggtggtaaaggttccatattgaatgtttcctcatactttggtggtgaaaagtatgttgccgtagcatatccaaacagagctgattacgccgtatctaaggcaggtcaaagagtattagcagaaatattgtcaagacacttgggtcctgaaatccaaatcaacgctttagcacctggtccagttgatggtgccagattgagaggttcagccgaagcccctggtttattcgatagaagaggtagattagttttagaaaataagagattaaatgaagtccataaggctatcttggctggtatgagttcaggttttgatgctgacggtgttatgagtttggcatcaaacgctgttgattcaattgacatcgactccttacctaaaccagtcgccagattggtcttgaaaattagagattctggtggtatgggtaactcctcacactacttaatgcacatgggtatcgccgcaaaattgatgactagattagttagagcaggtatcttgtccgacgaacaaagagaacaatttttgggtacattcatagacgccccagcaccatttttcgatttctcagaaacttccaagcaagcagaacaaatcgaaacaggtattttgaacagattacacttgcataagatgcctacagatgaacaagtcggtttatccaccgtctttcacttggcagatgacattgtatctggtgaaacctttcatccatcaggtggtttgaaattcgacagatccgtcacagaaggtgaattgttgttacctccaaatgaaacagaagttgctaagttaaagggtaaaagaatcgttttgattggtgactcaatgagaaacgaattgactcatatagctaatggtttcttagcacaaaatgtagaaaaattgtgggttttgactaagacagaagattccgcaaacgctatgactcattcagtcgataaccctcatggtatcgacatagaatgtagagctattggtgacgacttagaaagttcattagatgacatcttgagaaacgatggtggttatgacgttgtagtttcatccccattcgaaagattgccattaaatgcattagctgccaacgctaatgaaccttgggatagagtcttatccgaccatgagtttagaaagttagttcacgaccaattgacccatcactttagagtcgcaagaaccagtgccttggttcctaattgccaaatcgttttaattactcctgacacttctttggcatcaactagagaagaatttgctttggccttattcgttaagaactcattgcacgcttttacagtcacattgggtgtagaaggtgaaagattgccaacagttccagcaattaatcaagtccaattgaccagaagagcacataccgaagaaccatccaacgaccaagaattggaagaagaaatgacaagattagtccatgccgtattacaatgctcagtccctgcaccagcaccatccgattcaagatacttgtccaaaatctttagaggtaacgctgtcaccgtataa

SEQ ID NO: 41 - DNA, 3666 bp, Artificial Sequence
  HPDH-MCRot
atgtttatgacaagattgaatgacaagattgctttgattactggtggtgctggtactataggtgaagttattacaagaagatatttggaagaaggtgcaacagtagttatggctggtagaaatagagacaaattagacagatatagagaaagattgataactgaatttcatgctttaccagaaagagttatggtagttagaatggacggttcatccaacgcagaagttagaatgggtattgccgctgttgtagcccactttggtagaattgatatattggtaaataacgcaggttcagctggtgccagacaaagattgccagctatcccattattgagatcagaattgcaagcagacgaaaccgaaactttggcagattcaatcggtaacttaataggtatcacatggaatttgattagagctgcagctccattcatgcctgcaggttcctcagttatcaatattagtacaatctttgctagaactgactactatggtagaatcccttatgttgtaccaaaggccgcattacacgccttaacattggcagccgcaactgaattaggtgaaagaggtataagagttaaccaaatcaacccaggtcctatcgactcagatagaattagaactgtttttagaagaatggatgaattgaagggtgttccagaacaatcaactgctgatggtttctttcaaatgatgagattgagaaggcctaatgccgaaggtgacttagttaagggttttcctaagactttggatgttgccaacgttgctgtatttttaggttccgcagaatcagctgcattgtccggtgaaacattggatgttacacacggtatggcagttccaacagaatcaagaacaactttgacaagtagacctggtttgagagcagtagacggtagtggtcacacaacattaatttgtgttggtgaccaaatcgaagaagcagcagccttaactggtgtattgagagcatgtggtgccgaagtagttatcggttttagatctagagccgcaatcgctagattcgaccacttgatcgaaagaggtagacacttaccatctcaagaacatgttgcccctgttttgttatatttgaatcctacagaaccagaatcaatagaccaagccttgagatggatggccactaacttagacttgcctacaagtgtaatcattttgcctgcacaaagacaaccattacctcctagtgttgttagagcctcagatgaagaagttgcatactttttaagagatgaattgagtggtatgatcgtcttggcaagtagattagcaagattctggcaacaagcaacattggcacctggtaatgcacctattcaaccaagagttttattcatgacaaacccagacgatggtcaaggtaacttatatgcagaaatattgagagcaggtgttgaacaattgtgtagagtttggagacacgaatcccaattggattatactagattggcccaaatggatgcacatccacctcatattagaccagtttgggcaaaccaattggttagatttgccaacaatgaacaagaaaatttggaatactgctgtgcttgggttgccaagatattgttatccgaaagaacaattgaagaattaaacttatacttgcctagacaaataggtagtacaacaggttccagacaaccttcctttggttgggcagaaaacttgataggtttgcacttgggtaaaacagcattgataactggtggttcagctggtataggttcccaaatcgcaagattgttagcattgtcaggtgcaagagttatgttgtgcgcaagagatgaaagaaaattaatccaaatgagagacatgataatcgcagaattgactgaagtcggttataaccaagttgaatctagagtacaaatttgtgccggttgtgacgttggtgaagaagaacaattggaaattgctgttcaaagaactttggacttatttggtcatgttgattacttaattaataacgcaggtattgccggtgctgaagaaatggttttagacttgcctttagaagcttggcaaagaactttaagaacaaatttgataagtaattattcattgatcagaaaattggctccacaaatgaaatcaagaggtagtggttatatcttgaatgtctcttcctacttcggtggtgaaaagtatgccgctattccttatcctaatagagctgattacgctgtatccaaagccggtcaaagagccttaggtgaagctttggctagattgttaggtccagaagttcaaatcaacgcaatggctccaggtcctgttgaaggtgaaagattgagaggttctggtgacagacctggtttatttttaagaagaggtagattaattttggaaaacaaaagattaaacgacttgcacgcaacattgattgctgcagaaagagaaacccaagttggtatgagagacttattagccagattgttacataacgatgtttgtgctttgattgatgaccctgcagccccaacacacttgagagctttggctgaaagaatctgggaacaatccgatccaaactcctatgctagagccttctttatgaatgccaatattgctactaagttattggccagattgttcaacgccgatcaaattgacgcccaaacattccacacatcccaacctaacttgccacctgaacctttcttcgctagaacccaaatagatagagaagctagaagagtcagagatggtgtaatgtccatgttgtacttacaaagaatgcctacagaatttgacgtagcattagccacagtttattacttgaacgacagatccgtttctggtgaaacattccatccaagtggtggtttaagacatgaaagaaccccaaccggtgccgaattgtatggtagtcctgcaccacaaagattggccagtttagccggttcaaccgtctatttgattggtgaatcaatggctgctcacttggaagctttagcaagagcttacattgaaagatacgcagctacaagagttgtcttgatctgtgctacacctgcaggtgttgaaagattcagtcatcacttagccgaccacttagcttctggtgctttggccatattatccgccgaagaaggtatcgaagcagctttgtcagaagccttgagaagattcggtcctccaggtccagttgttagtactcctttccaacctttgccatcacaacctttgattggtagaaacgactcagattggagtaccgttttagatgttgctggtttctccgcaatgtgtgaacaacaattaacccatcactttagagtcactagaaaattaagtttggtcgcaggtgtatcattggttttggtcactcctgaaacagattcacacagttccacagaacaattcgctttggctaactttgttaagactacattacacgctttcactgccacagttggtgttgaatgcgaaagaacagcacacagaattttggtcaatcaagttgatttgggtagacaagctagagcagaagaaccaagatcacctgcagaacaagcacaagaaatggaaagattcattgacgccataatgttaactaccgcacctattccagctgaagaagataacagatatactggtagaatatacagaggtagagccataacagtttga

SEQ ID NO: 42 - DNA, 3690 bp, Artificial Sequence
  HPDH-MCRrc
atgtctacagtcagaagattggaaggtaaagttgcattgataacaggtggtgccggtaatataggtgaagtaataacaagaagatttttggcagaaggtgctaccgttgttatcacaggtagaaatgccgaaaaattggctgtctacagaagaagattaattgacgaagaaagagtagcaccagaaagagtcgttgctttgagaatggatggttctgacattgcccaagttagagctggtgttgctcaaattgttcacggtggtacagatgtcccaatcccattgcatagaatagatatcttggtcaacaatgcaggttctgcaggtccaagaagaagattagttgatatccctttggaaccatccgaagttcaacctccagattcagaaactttggcacaagctgttggtaatttggttggtataacatggaatttgacaagagcagccgcaccacacatgccatccggttcatctgttattaacatctctacaatcttctcaagaaccgattactacggtagaatagcctatgtagcacctaaggctgctttgaacgcattatctgacggtttggccagagaattgggtgttagaggtatcagagtcaataccatatatcctggtccaatcgaatcagaaagaatctacactatgtttcaagctatggacgctttaaagggtcaaccagaaggtgacacagctagtggtttcttaagaatgatgagattgtctagaatcgaccaaaacggtgaagttgttaagagattcccaagtcctgtagatgttgcaaatactgctgtattcttggcatctgacgaaagtgcagcttttacaggtcatgcctttgaagtcacacacggtatggaagttccaaccgaaagtagaaccactttcgtttccagaccaggtttaagatccgttgatgcaaccggtaaagttattttaatatgtgccggtgaccaagttgatgacgctgtcgcattggctgatacattgagatcatgtagagctaccgttgtcatcggtttcagagatccaagagcattagaaaaggcatccgttttgttgagagaacctagacacgctttggcagctgacatgtacggtagacctacaatgactgcagaagctagattggtcagattagatcctttagacccaagagcagctgcccaaactttggaacaaatacatgccgaattgggtgccatccaccatgctgtcgtattgcctggtcaatctagacatgcaccttcagcttccttgatcgaagttgatgaccaagttgttgaaagattcttacaccaagaattagttggtactattgccttagcaagagaattggccagattttgggaagaatatccatccggttcttcaatgcatagagttttatttgtttccaatcctgacgatcaacaaggtaaccaatacagtcacatcttgagagctgcagttgaacaattagtcagagtatggagacacgaatccgaatatgactccgttaaccctgcacaccaacaagaaggtcaatcctcagcagctgtttgggctaaccaattaataagatatgttaataacgaaatggctaacttggacttcacttgcgcctgggttgccaagttattaggttccgatagaagaatcgccgaaattaacttatacttgcctgaagaaatcgttggtacaataggtgtccacaatcctggttttggttgggctgaatccttatttggtttacacatgggtaaagtcgcattaataacaggtggttccgccggtatcggtggtcaaattggtagattgttagcattaagtggtgctcatgttatgttagcagctagaaatgcagatcaattagaacaaatgagagcttccatagttagagaagttagagatgcaagttatcctgacgcagaatcaagagttgccatcttccctggttcagacgtttcagatatcgacggtttggaaagattggtaaatcatacagtaagagtttttggtaaagttgactatttgatcaacaatgctggtatagcaggtgcagaagaaatggttatagacatgccagttgatgcatggagacacacattgagagccaacttaatctccaattatgcattattaagaagattagcaccacaaatgaaggcagccggtggtgcatacgtattgaacgtatcatcctattttggtggtgaaaaatacgttgccataccataccctaatagatccgactacgcagtttccaaagctggtcaaagagcaatggttgaatccttggcaagatttttgggtccagaaatacaaatcaacgcaatagctcctggtccagttgaaggtgaaagattgaaaggtgctggttcaagacctggtttattcatgagaagagccagattgatcttagaaaataagagattgaatgaagttttcgccgctttattggccgcaagacatgaaggtgccacaatagccgacttgttacctgacttgttcgccaatgatatccaatcaatagcaaattccgcagccatgccagcacctttgagaagattagccacaatgttgagagaaacatctgacgcaggtggtagtgcccaatcatatttgatgaacgctactatcgcaagaaaattattgaacagattggaaaacggtggttatatcaccttacacgatagaagagccttgactgttgaaccacctgaacctttcttcacagaagcacaaatcgaaagagaagccatcaaagttagagatggtatcttgggtatgttacacttacaaagaatgccaaccgaatttgatgtagcattagcaaccgttttctacttggccgatagaaatgtcacaggtgaaacttttcatccatcaggtggtttgagatttgaaagaacagttaccgaaggtgaattgttcggtaaaccaggtcaacaaagattagaaagattgaagggttctgtagtttacttaatcggtgaacatttgagacaacacttggttttattggccagaacctttttggatgaaatacatgtagccagagttgttttattgaccgaaaccacacaagcagctactgacttagcagccgaattgtctgactatgaagctgcaggtagatttgtcgtaatcccaacttgcggtgacatagaaggtggtattgacagagcaatggcagaatatggtagacctggtccagtcatctcaacacctttcagacctttaccagatagagctttatcagctagaaatggtgactggtcctcagttttaactacagctgaatttgaagaattggttgaacaacaaatcacacatcacttcagagttgcaagaaaagcaggtttgatcgaaggtgctaacgttaccttagtcaccccacctacttcagcaagatctacatccgaagaatttgccttggctaattttgtaaaaacaacattacatgcattgaccgccacagctggtgcagaatccgaaagaacagttccacatgtcccagtaaatcaagttgatttgaccagaagagctagatccgaagaaccaagaaccccttccgaagaagaagaagaattgcaaagatttgtcaatgccgttttgttaacctccgctcctttaccaacacctttggaatcaagatatagagccagaatctacagaggtaatgctatcacagtttaa

SEQ ID NO: 43 - DNA, 3615 bp, Artificial Sequence
  HPDH-MCRsl
atgaatgcaatgggtaaaacagaaacacaaggtagattagctggtaaagtagccttgataactggtgccgccggtaacttaggtggttctatcgtaagaagatatttggccgaaggtgcaacagttgtcatgtccggtagagatgctgccagaactcaagcagctttagatgcagcagtagctgacgttggtggtactgcttcaattgtcactatggatggtgcaaatatcgaatccgttagagcaggtatcgcagatgttgtcgcaagacatggtagaatagacgtcttggttaataacgcaggttcagctggtccaaagcaagttttgggtgacttacctttgttgccagaagaattggaaggtacacctgattcagaaacagttggtgacgcagcaagaaatataatggttgtcgcatggaacttagttagagctgccgcatctgctatgggtgaaggtggttccatcattaatgtttccacaatattctcaagaactgattattttggtagagcagcttatacagttccaaaagctgcattgaatatcttatccaaaggtatcgcaagagaattgggtaccagaggtatcagagtcaatcaattgtatcctggtccaatcgcctcagaaagaatcagaacagttttcgccgcaatggataagttgaaaggtgacgatgccggttcaactgccaaccatttctttaatttgatggctttggaaagaagtgtaggtgaagatgccaaagcaaagaccttccctacaccagctgatatcgcaaacacttgcgttttcttgggttcagacgaatccgctgcctttgcagcacacgactttgaagttacacatggtatggcagtacctttggaatcaaaatccgaatttttgcatagacctgacttgagagcaatagatggtgacggtcatggtatcttgatttcagccggtaaccaattagacgatgcattggctatggcaggtttgttcgcagcacaaggttcaaaagtcttgttgggttttcacgcacaagctgcattggacgatgcagcagaaagattgccagccggtgtcaaagcagttagatttccaagacatgaccatatggcaatggacgctgaattggccagattcacagcacatgtagccgcaattgacggtgctattatattgccaacaagaggtccaggttactttcatggtgcattgaacgaagcttccgacgctgccgttgaaagatttgtcgatgacgaattggaaggtgcaattgctgttgcaagaacattagatagatattggcaacaaggtcaagacttgcctggtgaccctagagtcttgtttatcacaaaccctgatgatggtgcaggtaatggttgggcagatgttggtagagcagcaatcgaagaattgttgagagtttggagagatgaagctagagtagccgcaacacaaggtaaaactcctagacctgtttggggtaaccaaattgttagatttggtaataacgaaccagaaaatagagactttgctgcaggtcatgccgcaagattgttattaggtggtagacaaatagaaccaatcaatttgtacatccctgcatctatcacaaaagccactggtgccagaagagccttagcaggtaccgcagaaaatatcacaggtttgcatttgggtaaagtagccttgattacaggtggttccgcaggtataggtggtgccttagccagattgttagccttggcaggtgcaaaagttatgatggtcgctagaagagaatctgaattagatgctgctagagaaagaatcgttggtgaattgcaagacatcggtttcgcaggtgtcgaaagaagagttttgaccttggctggtattgatgttgctgacatgaaatcattaaagcacgctgttgatgaaacagtcagagcattcggtagaatcgactacttaattaataacgccggtgtatcaggtgcagaagaaatggctgttgatatgggtgttgaaaacttcagacatacacaatttgcaaatttgatctcaaactacgctttaatgcacatggttgtcccaatgatgagaaaacaaggttccggttatatcttgaatgttagttcttactttggtggtgaaaagtatttggctgtctcctatccaaatagaacagactacgcagtatcaaagtccggtcaaagagcaatggttgaaagtatggcaagacacttaggtcctgaaattcaaatcaatgccatagctccaggtccagtagatggtgacagattagctggtttgggtggtaaaccaggtttgtttgaaagaagaggtagattgattttagaaaacaagagattgaacgctgttcactcagctgttatcaagtccgtcagagcaggtggttctgttgcccaaattttattcagattgtccagaaatgactcagttcaattgtcccacgataagtcaaacccacaacctttaagagatttggccttggcatgtgcaagagaaggtgacgaatcatgctgctgggacagattcatcttgacacctgtattggccgcaaagttgttgaaaagattaagattgggtggttggttgataggtaccgactggcaatccagagatgaatccgattggttgttaagagtccctccagacgacatgccttggttgccagttgcacaaattggtagagaagcagccaaagttagaggtggtgtattgtcccaattacatttgggtaaaatgcctaccgaaacagaagttgctcaagcaactgttttctttttagctgatagagcagtctcaggtgaaactttcatgccttcaggtggtttaaatgtcgaaagatccgccaccgaaagagaattgtttggttcccctaaggcagaaagattggcacaaatgggtggtaaaacagtttggttggtcggtgaacatttggcagactacttgggtgctgcagctcaaggtttcttgaattgtgacgttgctagagtagttttaatcactgcctcagctgcaggtgctacagccattaagggtcatattggttccggtgctgacagagtagaaagtttattgatagacggtgaaatcgaaacagccttagatgcagctttggctacttggggtcatcctactacaatcgtttccactccattgaaagcattgccagaccaattgtttgatgcagataatccattagatggtgacggttttgctgatgtcgttgaacataatttgactcatcactttagaattgccagaaaagtcagtttatttgacgaatgccaattggtattagtttcaccagatgttcctatgggtgaaggtgcaaaaggtgcatttgccttggccaactttgtcaaaaccacattacacgcttttactgcaactatcgcagttgaaaatgaaagattggtccacgaagtcgccgttaatcaaatcaacttgacaagaagagtaagatcagaagaacctaaaaacgcagctgaacatgaagaagaagttagaagatttgcaagagccgttttattggctggtgcaccattacctgacgcagaagatagtagatatagatccagaatctacagaggtatgtccttaaccgtataa

SEQ ID NO: 44 - DNA, 3663 bp, Artificial Sequence
  HPDH-MCRca_variant_3
atgagtggtacaggtagattggctggtaaaatagcattgataacaggtggtgcaggtaatataggttccgaattgacaagaagatttttggctgaaggtgcaactgttatcatatcaggtagaaatagagctaaattaactgctttggccgaaagaatgcaagcagaagcaggtgttccagctaaaagaatcgacttagaagtcatggacggttccgatcctgtagctgttagagctggtatagaagctattgttgcaagacacggtcaaatcgacatcttggtaaataatgctggttctgcaggtgctcaaagaagattggctgaaatccctttgactgaagcagaattgggtccaggtgctgaagaaaccttgcatgcttctattgcaaacttattgggtatgggttggcatttgatgagaatagctgcacctcatatgcctgtaggttctgccgtaattaacgtttccaccatattctcaagagcagaatactatggtagaatcccatatgttaccccaaaagcagccttgaatgcattgtcacaattggctgccagagaattgggtgccagaggtatcagagttaataccatctttccaggtcctattgaatccgatagaatcagaaccgtatttcaaagaatggaccaattgaagggtagacctgaaggtgacacagcacatcatttcttgaataccatgagattgtgtagagccaatgaccaaggtgcattagaaagaagatttccatcagtaggtgacgttgcagatgcagctgtatttttagcttcagctgaatctgccgcattgtctggtgaaaccatcgaagtaacacatggtatggaattgccagcttgttctgaaacatctttgttggcaagaacagatttgagaactatagatgcatctggtagaacaaccttaatatgtgctggtgaccaaattgaagaagttatggctttgactggtatgttaagaacttgtggttctgaagttattataggtttcagatccgctgcagctttggcacaattcgaacaagccgttaatgaatctagaagattggcaggtgctgattttacccctccaatcgctttaccattggacccaagagatcctgctacaattgatgcagtttttgattggggtgcaggtgaaaatactggtggtatccacgcagctgttatcttgcctgcaacctctcatgaaccagccccttgtgttatagaagttgatgacgaaagagtcttgaacttcttggctgatgaaatcacaggtactatcgtaatcgcttctagattggcaagatactggcaatctcaaagattgacaccaggtgccagagcaagaggtccaagagtaattttcttgtcaaacggtgctgatcaaaatggtaatgtatatggtagaatacaatcagctgcaataggtcaattgatcagagtttggagacacgaagctgaattggattatcaaagagcttctgctgcaggtgaccatgtattgcctccagtttgggctaatcaaatcgtaagattcgcaaatagatctttagaaggtttggaatttgcctgtgcttggaccgctcaattgttacattctcaaagacacatcaatgaaatcaccttgaatatccctgctaacatctcagcaaccacaggtgcaagatccgcttcagttggttgggccgaatctttaataggtttgcacttgggtaaagttgcattgatcacaggtggttctgctggtatcggtggtcaaatcggtagattattggcattgtcaggtgcaagagtaatgttagcagatattcaagaagataagttagaacaaatgcaagccatgatacaaagtgagttagccgaagtaggttacactgacgtagaagatagagtccatatagcaccaggttgtgatgtctcctccgaagcccaattagccgatttggttgaaagaactttgtccgctttcggtacagttgattatttgattaataacgccggtatcgctggtgtagaagaaatggttatagatatgccagtcgaaggttggagacatacattattcgcaaatttgatctccaactacagtttgatgagaaagttggctcctttgatgaaaaagcaaggttctggttacatcttgaatgtttcttcatactttggtggtgaaaaagatgctgcaattccatatcctaacagagcagactacgccgtatcaaaggcaggtcaaagagctatggctgaagtttttgctagattcttaggtccagaaatccaaattaatgcaattgccccaggtcctgttgaaggtgacagattgagaggtactggtgaaagacctggtttgttcgctagaagagcaagattaatcttggaaaataagagattaaacgaattgcatgccgctttgatagcagccgctagaacagatgaaagatctatgcacgaattagtagaattgttgttgccaaatgacgttgcagccttggaacaaaacccagctgcacctactgctttaagagaattggcaagaagattcagatctgaaggtgacccagctgcttcttcttcttctgcattgttgaatagatcaattgcagccaagttattggctagattacataacggtggttatgtattgccagccgatatatttgctaatttgccaaacccaccagatccatttttcacaagagcacaaattgatagagaagccagaaaagttagagatggtataatgggcatgttgtacttgcaaagaatgccaactgaatttgatgttgctatggcaacagtctattacttagctgacagaaatgtttctggtgaaacttttcatccatcaggtggtttgagatatgaaagaactcctacaggtggtgaattattcggtttgccatcccctgaaagattagctgaattggtcggtagtaccgtatacttaattggtgaacatttgactgaacacttgaatttgttggccagagcttatttggaaagatacggtgcaagacaagttgtcatgattgttgaaaccgaaactggtgctgaaaccatgagaagattattgcatgatcacgtcgaagccggtagattgatgactattgtagctggtgaccaaatagaagctgcaatcgaccaagctattacaagatatggtagaccaggtcctgtagtttgtacaccttttagaccattacctaccgtccctttggtaggcagaaaagattctgactggtcaaccgttttatctgaagccgaatttgctgaattatgcgaacatcaattgactcatcacttcagagttgcaagaaagattgccttgtccgatggtgcaagtttagccttggtcaccccagaaactacagcaacttccaccactgaacaattcgcattggccaacttcatcaagacaaccttgcacgctttcacagcaaccatcggtgtcgaaagtgaaagaactgctcaaagaatcttaattaaccaagtagatttgacaagaagagctagagcagaagaaccaagagatccacatgaaagacaacaagaattagaaagattcattgaagctgttttattggtcacagcaccattgccacctgaagccgataccagatacgctggtagaatacatagaggtagagctataacagtttaa

SEQ ID NO: 45 - DNA, 3663 bp, Artificial Sequence
  HPDH-MCRca_variant_6
atgagtggtacaggtagattggctggtaaaatagcattgataacaggtggtgcaggtaatataggttccgaattgacaagaagatttttggctgaaggtgcaactgttatcatatcaggtagaaatagagctaaattaactgctttggccgaaagaatgcaagcagaagcaggtgttccagctaaaagaatcgacttagaagtcatggacggttccgatcctgtagctgttagagctggtatagaagctattgttgcaagacacggtcaaatcgacatcttggtaaataatgctggttctgcaggtgctcaaagaagattggctgaaatccctttgactgaagcagaattgggtccaggtgctgaagaaaccttgcatgcttctattgcaaacttattgggtatgggttggcatttgatgagaatagctgcacctcatatgcctgtaggttctgccgtaattaacgtttccaccatattctcaagagcagaatactatggtagaatcccatatgttaccccaaaagcagccttgaatgcattgtcacaattggctgccagagaattgggtgccagaggtatcagagttaataccatctttccaggtcctattgaatccgatagaatcagaaccgtatttcaaagaatggaccaattgaagggtagacctgaaggtgacacagcacatcatttcttgaataccatgagattgtgtagagccaatgaccaaggtgcattagaaagaagatttccatcagtaggtgacgttgcagatgcagctgtatttttagcttcagctgaatctgccgcattgtctggtgaaaccatcgaagtaacacatggtatggaattgccagcttgttctgaaacatctttgttggcaagaacagatttgagaactatagatgcatctggtagaacaaccttaatatgtgctggtgaccaaattgaagaagttatggctttgactggtatgttaagaacttgtggttctgaagttattataggtttcagatccgctgcagctttggcacaattcgaacaagccgttaatgaatctagaagattggcaggtgctgattttacccctccaatcgctttaccattggacccaagagatcctgctacaattgatgcagtttttgattggggtgcaggtgaaaatactggtggtatccacgcagctgttatcttgcctgcaacctctcatgaaccagccccttgtgttatagaagttgatgacgaaagagtcttgaacttcttggctgatgaaatcacaggtactatcgtaatcgcttctagattggcaagatactggcaatctcaaagattgacaccaggtgccagagcaagaggtccaagagtaattttcttgtcaaacggtgctgatcaaaatggtaatgtatatggtagaatacaatcagctgcaataggtcaattgatcagagtttggagacacgaagctgaattggattatcaaagagcttctgctgcaggtgaccatgtattgcctccagtttgggctaatcaaatcgtaagattcgcaaatagatctttagaaggtttggaatttgcctgtgcttggaccgctcaattgttacattctcaaagacacatcaatgaaatcaccttgaatatccctgctaacatctcagcaaccacaggtgcaagatccgcttcagttggttgggccgaatctttaataggtttgcacttgggtaaagttgcattgatcacaggtggttctgctggtatcggtggtcaaatcggtagattattggcattgtcaggtgcaagagtaatgttagcagatgttgatactagaaagttagaacaaatgcaagccatgatacaaagtgagttagccgaagtaggttacactgacgtagaagatagagtccatatagcaccaggttgtgatgtctcctccgaagcccaattagccgatttggttgaaagaactttgtccgctttcggtacagttgattatttgattaataacgccggtatcgctggtgtagaagaaatggttatagatatgccagtcgaaggttggagacatacattattcgcaaatttgatctccaactacagtttgatgagaaagttggctcctttgatgaaaaagcaaggttctggttacatcttgaatgtttcttcatactttggtggtgaaaaagatgctgcaattccatatcctaacagagcagactacgccgtatcaaaggcaggtcaaagagctatggctgaagtttttgctagattcttaggtccagaaatccaaattaatgcaattgccccaggtcctgttgaaggtgacagattgagaggtactggtgaaagaggtggtttgttcggtagaagagcaagattaatcttggaaaataagagattaaacgaattgcatgccgctttgatagcagccgctagaacagatgaaagatctatgcacgaattagtagaattgttgttgccaaatgacgttgcagccttggaacaaaacccagctgcacctactgctttaagagaattggcaagaagattcagatctgaaggtgacccagctgcttcttcttcttctgcattgttgaatagatcaattgcagccaagttattggctagattacataacggtggttatgtattgccagccgatatatttgctaatttgccaaacccaccagatccatttttcacaagagcacaaattgatagagaagccagaaaagttagagatggtataatgggcatgttgtacttgcaaagaatgccaactgaatttgatgttgctatggcaacagtctattacttagctgacagaaatgtttctggtgaaacttttcatccatcaggtggtttgagatatgaaagaactcctacaggtggtgaattattcggtttgccatcccctgaaagattagctgaattggtcggtagtaccgtatacttaattggtgaacatttgactgaacacttgaatttgttggccagagcttatttggaaagatacggtgcaagacaagttgtcatgattgttgaaaccgaaactggtgctgaaaccatgagaagattattgcatgatcacgtcgaagccggtagattgatgactattgtagctggtgaccaaatagaagctgcaatcgaccaagctattacaagatatggtagaccaggtcctgtagtttgtacaccttttagaccattacctaccgtccctttggtaggcagaaaagattctgactggtcaaccgttttatctgaagccgaatttgctgaattatgcgaacatcaattgactcatcacttcagagttgcaagaaagattgccttgtccgatggtgcaagtttagccttggtcaccccagaaactacagcaacttccaccactgaacaattcgcattggccaacttcatcaagacaaccttgcacgctttcacagcaaccatcggtgtcgaaagtgaaagaactgctcaaagaatcttaattaaccaagtagatttgacaagaagagctagagcagaagaaccaagagatccacatgaaagacaacaagaattagaaagattcattgaagctgttttattggtcacagcaccattgccacctgaagccgataccagatacgctggtagaatacatagaggtagagctataacagtttaa

SEQ ID NO: 46 - DNA, 777 bp, Artificial Sequence
  BDHcm
atggtcaacttacaaggtaaaacagcattggtcactggttcaacatcaggtatcggtttgggtatcgcagaagcattgggtagagccggtgctaatatagtattaaacggttttggtgacgttgatgctgcattggcaacaatcgccgctaccggtgcacaatctgcccatcacccagctgatatgagaaaacctgacgaaattgaagcaatgatagctatggcaagagaaagattcggtaccgttgatgtcttagtaaataacgctggtattcaacatgttgcacaagtcgaagattttccagcacaaaagtgggatgacatcttggccataaatttgacttcttcattccatactacaagacacgttatacctgctatgagagcaagaaattggggtagaatcgttaacattgcttcagtacatggtttagttggttccgccggtaaaagtgcttatgttgcagccaagcacggtttagtcggtttgaccaaagtaactgcattggaaacagccggtaccggtatcacttgtaatgctatttgcccaggttttgttttaacacctttggtcgctgcacaaatagatgctattgctaaaagagatggtatttctatggaagccgctagagctagattgttatctgataagcaaccatcaggtcaatttgtcactcctgaacaattgggtaacttggttttaatgttgtgtagtccattcggtgaccaagttagaggtgcagcctgggctatggatggtggttggacagctcaatga

SEQ ID NO: 47 - DNA, 771 bp, Artificial Sequence
  BDHkp
atgaatttgcatggtaaaacagcattagtaactggttctacatcaggtatcggtttaggtatcgccaaggtcttagcacaagcaggtgcacaattggtattaaatggttttggtgactcttctcatgctagagcagaagttgctgcattgggtaaaataccaggttatcacgatgctgacttaagagatgttggtcaaattgaagctatgatgcattacgcagaatccaccttcggtggtgtagatatcgttattaataacgccggtattcaacacgtcgctccagtagaacaatttcctgtcgataagtggaatgacatattggctatcaacttatccagtgttttccatactacaagattggcattacctggtatgagacaaagaaactggggtagaattataaacattgcatctgttcacggtttggtcgcatctaaagaaaagtcagcctatgttgccgctaaacatgccgttgtcggtttgaccaagactgtcgcattagaaacagccagatcaggtatcacctgtaatgctatttgcccaggttgggtattgactcctttagttcaacaacaaattgataagagaatagccgaaggtgttgacccagaacaagcctccgctcaattgttagctgaaaagcaaccaagtggtgaatttgttacacctcaacaattaggtgaaatggcattgttcttatgttctgatgcagccgctcaagtcagaggtgcagcctggaacatggacggtggttgggtagctcaatga

SEQ ID NO: 48 - DNA, 1113 bp, Artificial Sequence
  HBDHos
atgcaattattcaagttaaagaccagattatcaaagttcgatcatttcgcagatttcgccagagagtttaagttatcagaacatgacttggttatcactaacgaatttttgtacgaacctttcatgaagtcattaaacttgccatgtcatttcattatgcaagaaaaatttggtttaggtgaaccatcagacaagatgatgaacacaattttgaaagaagttaagggtgttggtttcgatagagtaatagctgttggtggtggtactgttatcgacatttcaaaattgttcgttttaaagggtgttgaagatgtcacagaagcattcgaaagaaaaattccaatcgtaaaagaaaagcaattagttatcttgcctacaacttgtggtactggttcagaagttacaaatatctcaatagcagaaatcacatcaaagcataccaagatgggtttggcagacgatgccatcgttgcagatgacgctgtattggttccagaattgttaaaaggtttaccttttaagttttatgcctgttctgctattgacgcattggttcatgctaccgaatcatatgtttctccaaaatcaaatccatacactagattatattgtagagctgccattgaaataatcattgatgtttttcaaggtatcgctgcaaacggtccagaatacagatttgaaagattgggtgacatgttaatggctagtaactacgctggtatagcttttggtaacactggtgttggtgcagttcatgccttgtcatacccattaggtggttcctaccatgttccacatggtgaatccaactaccaattctttacagaagtttttaagttatataatgccaagaacccatcaggtgacatagctagattgaatgacttgttatgtgtacaattgggtgttaatgaaaacccttacccagttttagacgaattgttgggtaaattgattcctaaaaacaaattgagagtctacggtatgaagccagaagaaattcaaggtttcacatcctcagttttacaaacccaacaaagattgttagcaaacaactatgtatccttatccgaagaagaaatcagagaaatctacaaagtattatattga

SEQ ID NO: 49 - DNA, 1137 bp, Artificial Sequence
  HBDHps
atggccttcatctattacgtcacacaaatccaatttgaatttggtgccgtcaagttattaaagcaagaatgcgaaagagtaggtatcactagaccattgattgtcacagatcctggtgtaaaagctgcaggtatattacaaaaggctttagatgcattgccaggtatcgctgtaactgtttttgaccaaacaccatcaaatcctaccgaagccgctgttagagcagccgctgcattgtataaagcaggtggttgtgatggtttaattgctgttggtggtggttccgcaatagactgcgccaagggtgttgctatcgccgctacacatgaaggtcctttgactacatacgctaccatagaaggtggttcaccaaaaatctccgatagagttgcaccattaattgccgtccctaccacttctggtacaggttctgaagtagccagaggtgctataatcatcgttgatgaccatagaaagttgggttttcattcatggcacttagttccaaagaccgcaatttgtgatcctgaattgactttaggtttgccagctatgttgacagcagccaccggtatggacgccattgctcattgcatggaaacctttatgtctccagctttcaatccacctgcagatggtattggtttagacggtttggaaagaggttggtcacacatagaaagagctactagagatggttccgacagagaagcaagattaaacttgatgtctgcttcaatgcaaggtgcaatggccttccaaaaaggtttaggttgtgtccattccttaagtcactctttgggtggtgtagatcctagattacatcacggtacattgaatgccatgtttttaccagctgttgtcagattcaacgctagtgcagaatctgttcaaaaggaaagaagattggatagaatggccagagctatgggtttaagatcaggttccgatatccctgacgcaattaaggatatgaatgccagattaggtttgccaactggtttggctgcaatgggtgttcaaagagattggttcgacagaattatagtcggtgcattggccgatcattgccacaagactaacccaagattagctagtcctgaagaatatagagaaatgttagaaacatctttgtga

SEQ ID NO: 50 - DNA, 867 bp, Artificial Sequence
  HIBADHas
atgcaaactatcggtttcatcggtttaggtgttatgggtaaatctatggcaagacacttattgagagcaggttattcattggtcgtttataccagaactaagcaaaaggcagaagatatattggctgaaggtgcattgtggaaagaaactgtaaaggatgttgctaaagctgcagacgttgtcatgacaatggttggtgaaccacaagatgtcgaatatgtatactttggtgacgatggtatcttggctcatgcaaagagaggtacatacgtcattgatttcactacatccaaaccaagtttagctgtaagaatacacgaagccgctaaagaaaagggtatctttgttttggatgcacctgtctctggtggtgacattggtgctagagatggtaccttatcaataatggttggtggtgacaaggaagccttctctgcttgtatgccattgttgtcacatttgggtaaaaatatagtctggcaaggtgaagccggtgctggtcaacacacaaagatgtgtaatcaaattgcaatagccaccaacatgataggtgtatgcgaagcattagtttatgcagaaaaagccggtttagatcctgaaagagttttgagatccattagtcaaggtgcagcctcttcatggtctttatcaaacttggctccaagaatgttggctggtgactttgcacctggtttctacgttaagcatttcatcaaggacatgggtattgctttagcagaagccgaaaccttgggtttatccttgcctggtttaaaattggccaagcaattatacgaatccttggctgaaagaggtgaagaacaaagtggtactcaagctttgtacaagtggtacaaggaatggtga

SEQ ID NO: 51 - DNA, 891 bp, Artificial Sequence
  HIBADHbc
atggaaatcgcattcatcggtttgggtaacatgggtggtcctatggctgctaacttattaaaggctggtcacgcattgactgtattcgacttagatgcacatgctgttgatgctgcagttagagctggtgctgcagcagcaacttcaccaagagatgctgcagccagaggttctttaatcattacaatgttgcctgccgcacaacatgttagagccgtttatttgggtgacgatggtgttttagccggtgcaagagccggtgcaaccttgatcgactgttccacaattgaccctggtacagtcagagctgttgcagatgccgctgcacaaagagacttccctttggctgatgcaccagtttctggtggtacaggtggtgctcaagcaggtactttgacattcatggttggtgctgatggtgcattgtttgaaagaattagacctgttttattggacatgggtagaaatgtagttcactgtggtggtactggtacaggtcaaatcgctaagatctgtaacaatttgttgttaggtatttcaatgatgggtgtttccgaagcaatggctttgggtgcagccttgggtatcgacccaaccgttttagcaggtataatcaacacctctacaggtagatgttggtcctctgatgcatacaacccatatcctggtgtttcagacacagcaccagctgcaagaggttatgcaggtggttttgcagccaacttgatgttaaaagacttgggtttagcaactgaagctgcaagatcagcccatcaaccagtttggatgggtgctttagcacaacaattgtaccaaagtatgtcccaacaaggtttaggtacattagacttttccgcctgcgtcaaattatacgaagcccaaccagcatga

SEQ ID NO: 52 - DNA, 888 bp, Artificial Sequence
  HIBADHma
atggctaaaataacattcattggtttgggtaacatgggtggtcctatggctggtaacttggtaaaagcaggtcacgaagtcacagtatttgatttgtccaaagacgctgtcgctgcattagtaagtgaaggtgcaaagaccgccggtactgctcatgaagccgcttcaggtgcagaatgtgttataactatgttgccagcaggtcaacacgttgaagccgtctatttgggtgacgatggtttgttagcaaaattgccagccggtacattagttattgattcttcaacaatagctcctgaaaccgcaagaggtgtagctgaagttgcaagagccaaagatattccatttttggacgctcctgtttctggtggtgtcggtggtgctaaggcaggtactttaacttttatttgtggtggttcagaagaagcttttaataaggcaaagcctatcttggatactatgggtaaaaatatcttccatgctggtgaccacggttctggtcaagttgcaaagatatgcaataacatgttgttagccatcttaatgtccggtacaagtgaagccttggctttaggtgtcaaaaatggtttagatccagctgttttatccgaaattatgaagcaatccagtggtggtaattgggcattgaatgtttataacccttggcctggtgtaatggaaggtgttcctgcttctagaaattacgaaggtggtttcttggttaacttaatgactaaggatttgggtttagccttcgacaatgctgtcaagaaccaagcttctatcccaatgggttcattagcaagaaatttgttccaattgcatgccggtcagggtaacggttctttggatttctcttcaattcaaagattatacaaacctgaatga

SEQ ID NO: 53 - DNA, 897 bp, Artificial Sequence
  HIBADHpa
atgacagatattgctttcttgggtttgggtaacatgggtggtcctatggctgctaacttattgaaggctggtcacagagtaaatgtatttgatttgcaaccaaaagctgtattgggtttagttgaacaaggtgcacaaggtgccgactctgctttacaatgttgcgaaggtgccgaagttgtcatttctatgttgcctgcaggtcaacatgtcgaatcattgtatttgggtgacgatggtttgttagcaagagtagccggtaaaccattgttgattgattgttcaactatagctcctgaaacagcaagaaaagttgccgaagctgcagccgctaagggtttgaccttgttagacgctccagtctccggtggtgtaggtggtgcaagagccggtactttaagttttatagtaggtggtccagctgaaggtttcgctagagcaagacctgttttggaaaatatgggtagaaacatctttcatgcaggagatcatggtgctggtcaagttgcaaagatctgcaacaacatgttgttgggtattttaatggctggtacagccgaagctttggcattaggtgttaaaaatggtttagacccagctgttttgtccgaagtcatgaagcaatcttcaggtggtaactgggcattgaatttgtataacccttggcctggtgttatgccacaagcccctgcttctaatggttacgctggtggtttccaagtcagattgatgaataaggatttgggtttagcattggccaacgctcaagcagttcaagcttctacccctttaggtgccttggctagaaatttgttttctttgcatgcacaagccgatgctgaacacgaaggtttagacttctccagtatacaaaagttgtatagaggtaaagattaa

SEQ ID NO: 54 - DNA, 888 bp, Artificial Sequence
  HIBADHxc
atgtctaaaatcgccttcatcggtttgggtaatatgggtggtcctatggtcgctaacttgataaaagcaggtcacgaattgagagtatttgatttggttcattctgctttagacactgcacacgctgcaggtgctcaagtcgcatcttcagcctcagatacattacatggtgcagaagttgtcatttctatgttgccagcttcaaaacacgttgaaggtttgtatttgggtgacgctggtattttagctcatataccagcaggtgccttggttatcgactgttccaccattgctcctgcaatggccagaaccgttgcaactgccgctcacgccagaggtttggatatgttagacgcaccagtttctggtggtacagctggtgcagccgctggtactttaacttttattgtaggtggtgcagcccaagcattggaaagagccagacctgttttacaagcaatgggtaaaaacttgttccatgttggtgacaatggtgctggtcaagtcgcaaagttgtgtaataacatggctttaggtgtcataatggctgcaactggtgaagctatcgcattaggtgtagcccaaggtttggacccagctgtattatcacaaatgatggcagtttctacaggtagatcatgggctaccgaagtctgcaacccttggcctggtgtattggaaaatgcccctgcttccagaggttatagtggtggttttggtaacgatttgatgttaaaggacttgggtttagttgctgaagccgctgtccaagcaggtgcctccattcctttgggtgaattagctagaaatttgtacgcaatgaacagtagagccggtaatggtgctttagatttctccagtgtagttaaattggtcgctaaggtatga

SEQ ID NO: 55 - DNA, 762 bp, Artificial Sequence
  HPDHam
atgacacaacaaacagtattcgttacaggtgcctccgcaggtttcggtgccgccatagcaagaagattcgtagcagaaggtgccagagttattgccgtcgctagatctgaagataaattggaaaagttagccggtgaattgggtgacgctgtattgccagttaaattagatgtctcagaccctgaagcagtaaaggaagttgtcacaaatttgccagccgattggcaacaagttgatgtattagttaacaacgctggtttggcaaaaggtttagaacctgcccataaggctgatttgcaagattgggacgaaatgatagctaccaatgttagaggtttaacccatgtcactagagcattgttaccaggtatggttgaaagaggtagaggtcacgttattaatataggttctatcgctggtacttatccataccctggtggtaacgtttatggtgcaacaaaagcctttgttcatcaattctccttgaatttgagaagtgatttgcacggtacaggtgtcagagtaaccaacgtagaacctggtatggttggtggtaccgatttttccaaggttagattcgatggtgaccaagcaaaagccgataaggtttacgaaggtactacaccattaactgctgaagatgtcgcagaaagtgtattttgggctgcaaatcaacctgcacacgttaatatcaacgtcattgaattgatgccagtagttcaatctttttcacctttgcaaatattcagagataactcatga

SEQ ID NO: 56 - DNA, 1653 bp, Artificial Sequence
  HPDHbs
atgaccgctggtaaaggtaaaggtgctaaagttgaccctgctggtggtaaagccgctactggtagattggccggtaaagttgcattggtcacaggtgcagctggtaatttgggtggtgccattattagaagattcattgccgaaggtgcaactttggttatgactggtagaactaaggaaagattagctgcagcaaagcaagctttattggacgaaactggtgttgaagaagcaagagtttttaccgtaatcttggatggtgctgatccagattcagttagagcaggtattgatcaagtcagagctgccttaggtagaattgatgttttggtcaataatgcaggttcagctggtcctagacaaacattggaaaacgtaccattgactagagccgaaatggaagcaaatggtgactcagaaacagtagctgacgccatgagaaatttgttgggtgtcagttggaacttaacaagagcagctgccccaataatgccagtaggtgcatcagtcgttaatatttccaccatcttctctcacacaagatactatggtagaacagcctatgtcgttcctaaggctgcattaaacgccttatcccaagaattagcaaaggaattaggtgcatctggtataagagtaaatacagttttcccaggtccaatcgaaagtgaaagaattagaacagttttcgcagctatggatgccttgcaaggtgaaccagaaaactctactgcaaatcatttcatgggtagaatgacattggaaagagctatcggtgacgcccctaaaagaaagactttgccagttccaggtgacattgcagatgcttgtttgtttttagcatcagatgaaagtgctgccttaaatggtaacgaaatagatgttacacatggtatgcaagttagaaaagatagtagatcaacttacatgactagaccatccatgagatctttggacggtgcaggtttgaccgtcttaattgccgctggtgaagcatgggaagatgcattagatatggctaagatccaagctgcatgtggtgccagagtcttattgggtatgactagacaagttgacgtcgcacaagccgaagccagagttaaagctcaaggtgctgaagaaggtttaaccatcatgagattcaacagagctgaacctgatggtatggaagcagccataagagcctattctgatgcacatggtgcaatccactctgccatcgttttacctgtaaagccagctggtcatttcggtgactctttggttgaagcttcagatgcagaagttgacgctttgattgatatcgaattaaccggtgctattgcagttgccagaaccttgagaagatactggaaaacatgctctgacttgatgcaagatccaagattcgtctttatgtcaggtccatctgatggtaaaggtaacaaagcaggtagaatattagcagccgcaatagcccaattaatcacaatttggagagatgaatctagagtagactttgcacaaggtagacaaaagagagccgcatggggtaatcaaatagttagatacacaaatgaagaagatgaaaacaccagattcgccgcaggtcatgctactagaattgttttcaaggaacaaaagataactgaaacttccttgtacttgccttaa

SEQ ID NO: 57 - DNA, 1653 bp, Artificial Sequence
  HPDHca
atgagtggtacaggtagattggctggtaaaatagcattgataacaggtggtgcaggtaatataggttccgaattgacaagaagatttttggctgaaggtgcaactgttatcatatcaggtagaaatagagctaaattaactgctttggccgaaagaatgcaagcagaagcaggtgttccagctaaaagaatcgacttagaagtcatggacggttccgatcctgtagctgttagagctggtatagaagctattgttgcaagacacggtcaaatcgacatcttggtaaataatgctggttctgcaggtgctcaaagaagattggctgaaatccctttgactgaagcagaattgggtccaggtgctgaagaaaccttgcatgcttctattgcaaacttattgggtatgggttggcatttgatgagaatagctgcacctcatatgcctgtaggttctgccgtaattaacgtttccaccatattctcaagagcagaatactatggtagaatcccatatgttaccccaaaagcagccttgaatgcattgtcacaattggctgccagagaattgggtgccagaggtatcagagttaataccatctttccaggtcctattgaatccgatagaatcagaaccgtatttcaaagaatggaccaattgaagggtagacctgaaggtgacacagcacatcatttcttgaataccatgagattgtgtagagccaatgaccaaggtgcattagaaagaagatttccatcagtaggtgacgttgcagatgcagctgtatttttagcttcagctgaatctgccgcattgtctggtgaaaccatcgaagtaacacatggtatggaattgccagcttgttctgaaacatctttgttggcaagaacagatttgagaactatagatgcatctggtagaacaaccttaatatgtgctggtgaccaaattgaagaagttatggctttgactggtatgttaagaacttgtggttctgaagttattataggtttcagatccgctgcagctttggcacaattcgaacaagccgttaatgaatctagaagattggcaggtgctgattttacccctccaatcgctttaccattggacccaagagatcctgctacaattgatgcagtttttgattggggtgcaggtgaaaatactggtggtatccacgcagctgttatcttgcctgcaacctctcatgaaccagccccttgtgttatagaagttgatgacgaaagagtcttgaacttcttggctgatgaaatcacaggtactatcgtaatcgcttctagattggcaagatactggcaatctcaaagattgacaccaggtgccagagcaagaggtccaagagtaattttcttgtcaaacggtgctgatcaaaatggtaatgtatatggtagaatacaatcagctgcaataggtcaattgatcagagtttggagacacgaagctgaattggattatcaaagagcttctgctgcaggtgaccatgtattgcctccagtttgggctaatcaaatcgtaagattcgcaaatagatctttagaaggtttggaatttgcctgtgcttggaccgctcaattgttacattctcaaagacacatcaatgaaatcaccttgaatatccctgctaacatctaa

SEQ ID NO: 58 - DNA, 1653 bp, Artificial Sequence
  HPDHcag
atgtccgtcacaggtagattggcaggtaaaatagccttgataacaggtggtgctggtaacataggttcagaaatgactagaagattcttagccgaaggtgcaactgttattatctcaggtagaaactcagctaaattggccgctttagcagaaagattgagatccgaagcaggtgttcctgctaagagaatagatttggaagttatggacggttcagatccagctgctgttagagcaggtgttgcagctatcattggtagacatggtcacatagatatcttagttaataatgcaggttccaccggtgcacaaagaagattggctgaaatcccattaaatgaaaccgatagagacttagacgatgaagaagctttgtctacaagtgttgcaaatttgttgggtatggcttggcacttaatgagaatcttaagtcctcatatgccaccaggttctgctattataaacatctccaccatcttcagtagagctgaatactatggtagaatcccttacgtcgttccaaaggcagccttgaatacattgactcaaatcgctgcaagagaattgggtatcagaggtatcagagttaacacaatctttccaggtccaattgaatccgaaagaatccaaacagtttttcaaagaatggaccaattgaaaggtagaccagaaggtgacacagcatcacaattcttggcaactatgagattatacagagctaacgatcaaggtcaattggaaagaagattcccaacaatctgtgacgttgctgatgctgcagttttcttggcctctgatgaagcagccgctttgacaggtgaaactatcgaagttacacatggtatggaattgccaacatcttcagaaacctctttattggctagaacagacttaagaactattgacgcaaatggtagaaccactttgatatgtgccggtgaccaaatcgaagaagttatggctttgactggtatgttgagaacttgtggttctgaagtcattatcggttttagaagtgaagctgcattggcacaattcgaacaagccatcggtgaatctagaagattggctggtgaatcctttatcccacctattgcattaccaattgacttgagaaacccaagtacaatagacgcattatttgattgggctggtgaaaatactggtggtattcatgcagccgtaatcttgccagcatcaggtagagaacctgcaacacaagttatagacatcgacgatgctcatgtccaagccttcttaaacgatgaaatcgtaggttccatcattatcgcatcaagattggctagatactggcaagcacaaagaatcgcacctggtgccagagcaagagaacctagagtcatcttcttgtctaatggtgcatcaactgctggtaatccttacggtagaatccaatccgcagctatagaacaattaataagagtttggagacatgaagcagccttggattacgaaagagcaaccgctgcaggtgaaagagttttgcctgcagtttgggcatcacaaatcgttagatttgcaaacagatccttagaaggtttggaatttgcctgtgcatggaccgcacaattattacattcccaaagaagaattaatgaaataacattaactatccctgccgacatctcttaa

SEQ ID NO: 59 - DNA, 1653 bp, Artificial Sequence
  HPDHct
atgagaagaacaaaaccagaatgcttgagaagaaatgaaagtacaatgagattgaacggtaaagtcgccttaataacaggtgccgcaggtggtatcggttcagtagtcacaagaatgtacttgagagaaggtgctagagttgcaatttcctcaagatccttggaaagagcagaacaattcagagcagccttaatggccgaaggtttttcaggtgacgatattttgccagtagcatttgccagtacagacttagccggtatgcaaacagctatcgaagcaattgcagctagatggggtggtttggatgttttaattaacaatgctggttcagctggtgcaaagcaacctttgttcagaatccctttcacctcagaagatttggctcaattggcagctgaaggtttcacagaaaccgaaacaatgagagaaagtgctgccaacttattgggtatgccttggcacttaacaagattggctttaccttacttgagagttggtgcttctattatcaatgtatctacaatcttctcaagaaccaattattatggtagaataccatacgtagtcccaaaatctgccttgaacgctttatccttgggtttggccaaacaattgggtaccactgacagagctgtcagagttaataccgtttttccaggtccaatagattcagacagaatcagaaccgttttcggtgctatggacagattgaaaggtgtcccagaaggtactaccgctcaagaatttttcgacattatgattttggctagagcaagaggtggtgaagcacctacaaagtgttatccaactcaagctgatgttgctcacgtaattttatttttgggttcagatgaatctgcagccatatctggtcataactttgaaataactcatggtatgcaagttaaggcacaatccagaacaaaattgactgcatggccagaccaaagattgatagatttgtcaagaagagttgtcttgattgttggtggtgaacaagtacatgatgctgtcacaatagcagcctcccaacaatcatatggtgcttcagttatcttgacattcagacaaccagaagcagttaatactgcaaaagctcaattggaatccagaggtttgaaccattctatagcagttacctggttagacccattgagaagagaatctgttacaagtgttttcgacttaatcagagaaagataccacagattggataccgttatagtttttccagctcatgccgctggtcattatggtcctgaattgatcccagatgaacctgaaagaatcagacaattcaccgatgaagctattttaggtacaaccgcattcgcagctcaattgtccagatttttattggctttcgatgcagaaaacgaattgcaagaacctgtcaacgttttgtttgtcacaaacgaacacgacggtgctacaaatgcatttgaagatatctatagagccgcagtcgaacaattgttgagagtttggagacacgaagatgaattgcaagttgcagctggtacaagaagattcgccgtaagaaccaaccaaatagtaagatatgctaatgcagaaccagacaacttgaagtttacagccgattggttggcaacattagccaacagagtcagaatctttgatgaattaaactaa

SEQ ID NO: 60 - DNA, 747 bp, Artificial Sequence
  HPDHec
atgatcgtattagttactggtgccacagccggtttcggtgaatgtattacaagaagattcatccaacaaggtcacaaggttatcgccaccggtaggagacaagaaagattgcaagaattaaaggatgaattgggtgacaatttgtatatagctcaattggatgttagaaacagagctgcaatcgaagaaatgttggcctctttaccagctgaatggtgtaacattgatattttagttaacaacgccggtttggctttgggtatggaacctgcacataaagcctcagttgaagattgggaaactatgattgacacaaataacaagggtttggtttacatgacaagagcagtcttaccaggtatggtagaaagaaatcatggtcacattataaacataggttctacagcaggttcatggccttatgccggtggtaatgtatacggtgctaccaaagcatttgttagacaattctccttgaacttaagaaccgatttgcacggtactgccgttagagtcacagacattgaaccaggtttagtcggtggtactgaattttcaaacgttagattcaagggtgacgatggtaaagctgaaaagacctatcaaaacactgttgcattgacacctgaagatgtctccgaagccgtatggtgggttagtacattgccagctcatgttaacatcaacaccttagaaatgatgcctgttactcaatcttacgcaggtttaaatgtccacagacaatga

SEQ ID NO: 61 - DNA, 591 bp, Artificial Sequence
  HPDHed
atgtcagaagcaatcactcctggtgccttagaaactttattcactggtgcaagaactcacaacggttggcaaaatatgcctgtatccgatgaaactttgagagaaatctataatttgatgaaatggggtccaacatctgcaaactgttcacctgccagaattgttttcgtcagatctgccgaaggtaaagaaaagttaagaccagcattatcttcaggcaatttggaaaagactttaactgctcctgtaactgcaatagttgcctgggatggtgaattttacgaaagattgccagaattattccctcatggtgacgctaagtcctggtttacagcaagtccagccttggctgaagaaaccgctttcagaaactccagtttgcaagctgcatacttaatttttgcttgtagagcattgggtttagataccggtcctatgtctggtttcgatagacaaaaggttgatgaagcatttttcacaggtactacattgaagtcaaatttgttaattaacataggttatggtgacccaggtaaattgtacggtagattgcctagattagactttgatgacgcctgcggtttagcttga

SEQ ID NO: 62 - DNA, 1653 bp, Artificial Sequence
  HPDHgb
atgaacgatatgtccgatattccacaagacttattaacacaaagtatagcaggtagaagattagataacaaatgtattattttaactggtgcagctggttcaatcggttcctttattacaagacaattattgagagaaggtgcaagagttatgttaacaggtagagatcaatcaaaattggacgactttattggtgacttggtatcagaaggtttcgaagaaactttcatggtttccgcaactggtgactgtgccgatcctgaagtctgtagagaaatagttgccaagacagttgccgcattcggtcctattgatgttttagtcaacaatgccggtgccgcaggtccaaaattcacattgagagatatccctttcaccgaagcagaacaaagagcagctgactcagatcaaacaatgtttgactcagccatgaatttgttgggtgctccttggaatatggccagagccgctgcaccacatatgtcagctggtgcctctataatcaacgttagtactatcttttctagaactcattactatggtagaataccttacgtcgttccaaagtctggtttgaacgcattgggtaaaggtttggcattagaattgggtgaaaaacaaggtatcagagtaaacactttatttccaggtcctattgaatccgaaagaattgaatcagttttcgccagaatggatgaattgcaaggtgttgaacctggttcaactggtaaagagtttagagatttgatgataactacaagaacctctgatggtggtttggaatataaatacccaactccaacagatgttgcatcaggtatcgtttggttggcatctgatgaatcctcagccttatctggtcatcacattgaagtcaccaatggtatgcaagtaccagcacaatctagatcccaattggtttcatggccagataagagattggaagatttgtcaggtcaagtcgttttgattttaggtggtgacgactatcaagaagcagttactttcgccgaaagacaaatccaatccggtgcaagagtaatgttagctttcagaaacttgaataccgttggtcatgctagatcattagttcaatcaagaaatttgggtgacgttcaattatcccacttggaccctttgagaagagaatcagttgacagatccatgcaattaatcgcagatcactttggtagattagatggtgtaatcttgttaccacaaaagccaaacggtgaatacggttattccttgactacagctaatgacgaagatgttgccaattttgttagagatgaagttgtcgcccctgttgcatttgcatccgctttcgcaagaaacatggatcaattgtttgccgaaggtgaaccaccagccatcgtttacgttactaaccctagtgatagacatggtaacttgatgaatgaaattatcagagcaagtgttgaagccttaatcagaggttggagacatgaagatgaaactttggcaaacactggtgaattgccttgggcagtacaaccaaaccaaatggttagatatgataccgaagatagagaagctttaactttcgcagccgactgggcagccactttaaccaacagagttagaaagatggatagtatcaacttatggttaccaagaagtattaaataa

SEQ ID NO: 63 - DNA, 759 bp, Artificial Sequence
  HPDHhw
atgatagtattagtaacaggtgcctcctcaggtttcggtagagctattgccaagaagttcggtgaaaatggtcataaagtaatcgcattggcaagaagaaaggaaagattgcaatctttacaaaaggaaatcccatactgtgaaatcttgccttgtgatatctgcgacaaaaaggctgtcaaacaagcattggaagccttaccacaagatttcaagtctatcgacattttggttaacaacgctggtttggcattaggtattgaacctgcccaaatgtgcgatttcaaagactgggaaagaatgatatcagttaatgtcactgctttgtcctatttgacacatttggttttaccacaaatggtcgaaagaaaaagtggtcacattataacattgggttctattgcaggtaaatatccataccctggtggtaatgtatacggtgccaccaaagcttttgttaagcaattcgccttgggtttaagagcagatttggccggtactaacgttagagtttcagacattcaaccaggtttggctgaaagtgaattttctttagttagattcaaaggtgacaaaaagagagctaatgcattgtatgaaggttccaacgctttacaacctcaagatattgccgaagctgtctactgggtagcaacattgccaaagcatatcaacatcaacaccttagaaatgatgcctacttctcaatcattttccacattggcagttcacaaagaatactcattcttaaccaagtga

SEQ ID NO: 64 - DNA, 804 bp, Artificial Sequence
  HPDHka
atgtctcaaggtagaagagcagccgatagattagccggtaaagtcgtattgataactggtgcctccgcaggtattggtgaagccactgcatgggaatatttgtttgcatccaatggtcaagccaaattgatattgacagccagaagattggaaaagttggctgctattaaagaagaaatgaaaaaggaatacccaaacgttaagatacatgtcgctaagttggatgtttctaacacagaagaaatcaaatcattgttacaatgtttacctaccgagtttaaatctattgatatattggtcaacaacgccggtaaagctttaggttcagaaaaagtaggtgacattgctattgaagatataaagggtatgatggatactaacgttataggtttgattaatgtaacacaagcagttttgccaatcttgaaggaaaagaactctggtgacatcgtcaacattggttcagtagccggtagagatgcttatcctaccggttctatatattgcgctagtaaatttgcagttagagccttcaccgaatctttgagaaaggaattgttggatactggtattagagttatattgatcgcaccaggtttagtagaaactgaattttccttagttagatacaagggtgacgaaaagagagccaatagtgtttacgaaggtatcactgctttggaagcagaagatgttgctgaattaatcgttttctctacatcaagaaaaccaaacactgttatagctgatacattgatctttcctacctgtcaaggttccgcattccatgtccacagaagttga

SEQ ID NO: 65 - DNA, 945 bp, Artificial Sequence
  HPDHms
atgacagaaaaagtatcagtagtaggtgctggtgttattggtgttggttgggccacattattcgcctctaaaggttattcagtatctttgtacacagaaaagaaagaaaccttggataagggtatagaaaagttgagaaactacgtacaagttatgaagaacaactcccaaatcactgaagatgtcaacacagtaatctccagagttagtccaactacaaatttggacgaagctgttagaggtgcaaactttgttattgaagccgtcatagaagattacgacgctaaaaagaaaattttcggttacttggattctgtcttggacaaggaagttatattggcctcttcaacctctggtttgttaatcactgaagttcaaaaggcaatgtcaaagcatccagaaagagcagttattgcccatccttggaatccacctcacttgttaccattggttgaaatagtccctggtgaaaagacttctatggaagttgtcgaaagaaccaagtcattgatggaaaagttggatagaatcgtagttgtcttaaagaaagaaatccctggttttattggtaacagattggcctttgctttattcagagaagctgtatatttggttgacgaaggtgtcgctactgtagaagatattgacaaagttatgacagctgcaataggtttaagatgggcttttatgggtccattcttgacctaccatttgggtggtggtgaaggtggtttggaatatttctttaatagaggttttggttacggtgcaaacgaatggatgcacacattagccaagtatgataaattcccttacaccggtgttactaaggctatccaacaaatgaaggaatactcctttatcaagggtaaaactttccaagaaatcagtaagtggagagatgaaaagttattgaaggtatacaagttagtttgggaaaagtaa

SEQ ID NO: 66 - DNA, 1653 bp, Artificial Sequence
  HPDHot
atgtttatgacaagattgaatgacaagattgctttgattactggtggtgctggtactataggtgaagttattacaagaagatatttggaagaaggtgcaacagtagttatggctggtagaaatagagacaaattagacagatatagagaaagattgataactgaatttcatgctttaccagaaagagttatggtagttagaatggacggttcatccaacgcagaagttagaatgggtattgccgctgttgtagcccactttggtagaattgatatattggtaaataacgcaggttcagctggtgccagacaaagattgccagctatcccattattgagatcagaattgcaagcagacgaaaccgaaactttggcagattcaatcggtaacttaataggtatcacatggaatttgattagagctgcagctccattcatgcctgcaggttcctcagttatcaatattagtacaatctttgctagaactgactactatggtagaatcccttatgttgtaccaaaggccgcattacacgccttaacattggcagccgcaactgaattaggtgaaagaggtataagagttaaccaaatcaacccaggtcctatcgactcagatagaattagaactgtttttagaagaatggatgaattgaagggtgttccagaacaatcaactgctgatggtttctttcaaatgatgagattgagaaggcctaatgccgaaggtgacttagttaagggttttcctaagactttggatgttgccaacgttgctgtatttttaggttccgcagaatcagctgcattgtccggtgaaacattggatgttacacacggtatggcagttccaacagaatcaagaacaactttgacaagtagacctggtttgagagcagtagacggtagtggtcacacaacattaatttgtgttggtgaccaaatcgaagaagcagcagccttaactggtgtattgagagcatgtggtgccgaagtagttatcggttttagatctagagccgcaatcgctagattcgaccacttgatcgaaagaggtagacacttaccatctcaagaacatgttgcccctgttttgttatatttgaatcctacagaaccagaatcaatagaccaagccttgagatggatggccactaacttagacttgcctacaagtgtaatcattttgcctgcacaaagacaaccattacctcctagtgttgttagagcctcagatgaagaagttgcatactttttaagagatgaattgagtggtatgatcgtcttggcaagtagattagcaagattctggcaacaagcaacattggcacctggtaatgcacctattcaaccaagagttttattcatgacaaacccagacgatggtcaaggtaacttatatgcagaaatattgagagcaggtgttgaacaattgtgtagagtttggagacacgaatcccaattggattatactagattggcccaaatggatgcacatccacctcatattagaccagtttgggcaaaccaattggttagatttgccaacaatgaacaagaaaatttggaatactgctgtgcttgggttgccaagatattgttatccgaaagaacaattgaagaattaaacttatacttgcctagacaaatataa

SEQ ID NO: 67 - DNA, 816 bp, Artificial Sequence
  HPDHps
atgtcctatggtagtaaggccgcagaaagattggctaacaaggtcattttaataacaggtgcttccgccgccgctggtatcggtgccgcaaccgccagagaatttgctgaagctgcacatggtaacataaagttgatcttgacagcaagaagaaaggataagttggacgctttagcaaaagaattgaccgataagtatgacaacattaaagtccacaccgtagccttggatgttactaagttagaatctattggtcaattcgtcaaggatttgcctcaagaatttgcagatatagacgttttagtcaacaacgctggtttggcattaggtagagatccaatcggtgaaattttgcctgaagatatacaaggcatgttccaaacaaacgtattgggtttaatcactttgacacaagcagttttgccaatcttcaaagctaaaaattctggtgacatcgttaacttaggttcaattgctggtagagatccatatcctggtggtggtatctattgtccaactaaagccgctgtaaagtctttctcacatgttttgagaaaggaattgattaatacaagaatcagagttttggaagtcgatcctggtaacgttgaaaccgaattttccatcactagattcaaaaacgatgttgataaggccaaggctgtatatgctaacactgaaccattagtcgccgaagatattgctgaagtaatagtttttggtatcacaagaaagcaaaacaccgttattgcagaaactttgatattctcaacaaaccaagcatccgccagtcacttatacaaaggtcaagtttga

SEQ ID NO: 68 - DNA, 750 bp, Artificial Sequence
  HPDHra
atgataatattcgtcacaggtgccacagcaggttttggtgcagaaatcgcaagaaagttcgtaaaggaaggtcacaaggtaatcgcaacaggtagaagaaaggaaagattagatgacttgaaggctgaattaggtgacgctttgtatgccgtcgaattagacgtaaccaatagagcatctatagaagaagctattgcttctttgccagctgattggcaaaacattgacgttttggtcaataacgctggtttggcattaggtttggaaaaagccgataaggcttccttggaagattgggacaagatgatagatactaacacaaagggtttagtttacatgaccagagcagtattgccaggtatggttgaaagaaataccggtcatgttattaacataggttctactgccggtaattggccttatgctggtggtaacgtctacggtgcaactaaggccttcgtaagacaattctcattgaatttgagaaccgatttgcatggtactcacgttagagttacaaatattgaaccaggtttgtgtggtggtacagaattttccaacgttagattcaagggtgacgatgaaaaagtcagtaagacctacgataacactaaccctttaacagctgcagacgttgctgaatccgtcttttgggctagtacattgccagcacatgttaacatcaactctatcgaaatgatgcctgtttctcaatcattagcaggtttgcaagttcacagagaaggttga

SEQ ID NO: 69 - DNA, 1653 bp, Artificial Sequence
  HPDHrc
atgtctacagtcagaagattggaaggtaaagttgcattgataacaggtggtgccggtaatataggtgaagtaataacaagaagatttttggcagaaggtgctaccgttgttatcacaggtagaaatgccgaaaaattggctgtctacagaagaagattaattgacgaagaaagagtagcaccagaaagagtcgttgctttgagaatggatggttctgacattgcccaagttagagctggtgttgctcaaattgttcacggtggtacagatgtcccaatcccattgcatagaatagatatcttggtcaacaatgcaggttctgcaggtccaagaagaagattagttgatatccctttggaaccatccgaagttcaacctccagattcagaaactttggcacaagctgttggtaatttggttggtataacatggaatttgacaagagcagccgcaccacacatgccatccggttcatctgttattaacatctctacaatcttctcaagaaccgattactacggtagaatagcctatgtagcacctaaggctgctttgaacgcattatctgacggtttggccagagaattgggtgttagaggtatcagagtcaataccatatatcctggtccaatcgaatcagaaagaatctacactatgtttcaagctatggacgctttaaagggtcaaccagaaggtgacacagctagtggtttcttaagaatgatgagattgtctagaatcgaccaaaacggtgaagttgttaagagattcccaagtcctgtagatgttgcaaatactgctgtattcttggcatctgacgaaagtgcagcttttacaggtcatgcctttgaagtcacacacggtatggaagttccaaccgaaagtagaaccactttcgtttccagaccaggtttaagatccgttgatgcaaccggtaaagttattttaatatgtgccggtgaccaagttgatgacgctgtcgcattggctgatacattgagatcatgtagagctaccgttgtcatcggtttcagagatccaagagcattagaaaaggcatccgttttgttgagagaacctagacacgctttggcagctgacatgtacggtagacctacaatgactgcagaagctagattggtcagattagatcctttagacccaagagcagctgcccaaactttggaacaaatacatgccgaattgggtgccatccaccatgctgtcgtattgcctggtcaatctagacatgcaccttcagcttccttgatcgaagttgatgaccaagttgttgaaagattcttacaccaagaattagttggtactattgccttagcaagagaattggccagattttgggaagaatatccatccggttcttcaatgcatagagttttatttgtttccaatcctgacgatcaacaaggtaaccaatacagtcacatcttgagagctgcagttgaacaattagtcagagtatggagacacgaatccgaatatgactccgttaaccctgcacaccaacaagaaggtcaatcctcagcagctgtttgggctaaccaattaataagatatgttaataacgaaatggctaacttggacttcacttgcgcctgggttgccaagttattaggttccgatagaagaatctaa

SEQ ID NO: 70 - DNA, 969 bp, Artificial Sequence
  HPDHsi
atgtttatccacatgaagagtattaacaaagtagccgtagtaggtgctggtattatcggtgtaggttggacaactttattattgactaaaggttacaaggttaatttgtacaccgaaaagaaagaaactttagaaaagggtttggcaaaggtatctgcctatttggttaatttgaaaaatttgagaatgatagatggtgaaccaatcgactaccaaagaaatttgacaggtactacaaagattgatgaagccattcaaaacgttgaatttgtcatcgaagctatcatcgaagattactccgctaagaaaaatttgtttaattacttggatagtcaattgcctagagacatcattatagcatcttcaacatctggtttgttaatgaccgaaatccaaaaggctatgaccagatatccagatagaggtgttatcgcacatccttggaatccacctcacttgttaccattggtagaaattgttccaggtgacaaaacctcaaagtacactttggatgttacaaaggacttcatggaaaagttggatagagttgtcgtagttttgaagaaagaagttccaggtttcattggtaatagattggcctttgctttattcagagaagcagtcaacttgatagatgaaggtgtcgccactgtagaagatattgacaaagttatgacagctgcaataggtttaagatgggcttttatgggtccattcttgacatatcatttgggtggtggtgaaggtggtattgaatactttttctccaaaggttttggttatggtgccaatgaatggatgtacaccttggctaaatgggataagttcccttatactgctgttaaaaagatcgttgatcaaatgaaggaatacgagtttattaagggtaaaaatttccaagatttgtcaagatggagagatgaaactttggttagagtatacaaggcagtttttggtgaaaagagatga

SEQ ID NO: 71 - DNA, 1653 bp, Artificial Sequence
  HPDHsl
atgaatgcaatgggtaaaacagaaacacaaggtagattagctggtaaagtagccttgataactggtgccgccggtaacttaggtggttctatcgtaagaagatatttggccgaaggtgcaacagttgtcatgtccggtagagatgctgccagaactcaagcagctttagatgcagcagtagctgacgttggtggtactgcttcaattgtcactatggatggtgcaaatatcgaatccgttagagcaggtatcgcagatgttgtcgcaagacatggtagaatagacgtcttggttaataacgcaggttcagctggtccaaagcaagttttgggtgacttacctttgttgccagaagaattggaaggtacacctgattcagaaacagttggtgacgcagcaagaaatataatggttgtcgcatggaacttagttagagctgccgcatctgctatgggtgaaggtggttccatcattaatgtttccacaatattctcaagaactgattattttggtagagcagcttatacagttccaaaagctgcattgaatatcttatccaaaggtatcgcaagagaattgggtaccagaggtatcagagtcaatcaattgtatcctggtccaatcgcctcagaaagaatcagaacagttttcgccgcaatggataagttgaaaggtgacgatgccggttcaactgccaaccatttctttaatttgatggctttggaaagaagtgtaggtgaagatgccaaagcaaagaccttccctacaccagctgatatcgcaaacacttgcgttttcttgggttcagacgaatccgctgcctttgcagcacacgactttgaagttacacatggtatggcagtacctttggaatcaaaatccgaatttttgcatagacctgacttgagagcaatagatggtgacggtcatggtatcttgatttcagccggtaaccaattagacgatgcattggctatggcaggtttgttcgcagcacaaggttcaaaagtcttgttgggttttcacgcacaagctgcattggacgatgcagcagaaagattgccagccggtgtcaaagcagttagatttccaagacatgaccatatggcaatggacgctgaattggccagattcacagcacatgtagccgcaattgacggtgctattatattgccaacaagaggtccaggttactttcatggtgcattgaacgaagcttccgacgctgccgttgaaagatttgtcgatgacgaattggaaggtgcaattgctgttgcaagaacattagatagatattggcaacaaggtcaagacttgcctggtgaccctagagtcttgtttatcacaaaccctgatgatggtgcaggtaatggttgggcagatgttggtagagcagcaatcgaagaattgttgagagtttggagagatgaagctagagtagccgcaacacaaggtaaaactcctagacctgtttggggtaaccaaattgttagatttggtaataacgaaccagaaaatagagactttgctgcaggtcatgccgcaagattgttattaggtggtagacaaatagaaccaatcaatttgtacatccctgcatctatcacaaaagccactggtgccagaagagccttagcaggtaccgcagaataa

SEQ ID NO: 72 - DNA, 867 bp, Artificial Sequence
  HPDHsm
atggctatcttaatcactggtgcctcatcaggtttcggtgctgctatggctactgccttcgtccaagctggttacttagtcatcggtacagctagaagaaccgaaaaattagcagatttgcatgccaagttaggtgacagatttcaacctataactatggatatgacatcaaaggatgacattcaagctgcattagcacacatacaaaccttgccagaatacttcagagaaatagattgtttgatcaataacgctggtttggcattaggtttggatagagccgaccaagctgatttcaccgactgggaaactatgatccaaacaaacatcatcggtttaacctatttgactagacaaatattgcctaagatggttgaaaataagagaggttacatcattaacatgggttcaattgctggtaattatccatacgcaggttccaacgtctatggtgcaactaaggcctacgttagacaattctctttgaatttgagagctgatttgcatggtaccggtgtaagagttactaatatagaaccaggtttggttgaaggttctgaattttcaaacgtcagattcaaaggtgacgataagagagccgctcaattatatgaatacgcaaacgccttgacaagtgaagatatagctcaaaccgcattatggttgtatcaaagacctgcccacatgaatgttaacactatcgaattaatgccaactacacaatcttgggctggtatgcaagtttacaaagatacaccacctccacctccacctgttgtcgaaccaaagcctgccgactttgctccacaacctgctccacaagaagaatccggtttcttttctaagatcacatctttgttcaagtga

SEQ ID NO: 73 - DNA, 957 bp, Artificial Sequence
  HPDHst
atgagacaaatcaagacagtcagtgttattggtgctggtgttataggtgctggttggtccacattattggcattgaagggttacgaaaattggttttacactgaaaagaaagaaacattggataaaggtttggctaaaatcaagggttacttaaatgttttgtatgaatacaaattaattgacaaagaaccagattattacatgcaaagaatacatccaaccacaaaattggacgaagctatttccaatactgacttcgtcttggaagcaattgttgaagaatacggtgctaagaaagccttgttcaaacaattggacgaaaaattagataaagacgttatcttagcatcttcaacttccggtttattgatgactgaaatccaaaaggcaatgacaaagtacccagaaagaggtattatagctcatccttggaatccacctcatttgttgcctttggtcgaaatcgttcctggtgaaaagacatcacaagacaccatctacgcaacaaaggattttatggaaaacaagttggaaagagtcgtcgtagttttgaaaaaggaaatcagtggtttcataggtaatagattggcctttgcattgttcagagaagcagtttacttggttgatgaaggtattgccactgttgaagatattgataaagttatgacagctgcaatcggtttaagatgggccttcatgggtccatttttgacttatcacttaggtggtggtgaaggtggtttggaatatttcttttccagaggtttcggttatggtgctaacgaatggatgcatactttagcaaagtatgataagttcccatatactggtgttgtaaagtcagttcaacaaatgaaagaatatgaatttgtcaaatccaagacattccaagaattgagtagatggagagatgaaaagttgataagtttgataaagttgttgagaggtaaaatataa

SEQ ID NO: 74 - protein, 480 aa, Artificial Sequence
  AADHab
MEINEKDLKLIIENVLDKLESDKSDKKIFDSSLNIPSSGQDGIFEEVNAAVDAAEAAHLELMKLTLEKRREIIRSIRKIIMSNLEEISKLAVEETTFGRVEDKIEKNRLAALKTPGIEDLEPTAYSDDNGMTLMERAAYGVIGSIIPSTNPTSSVINNGISMIAGGNSVVFNPHPAAKRSSCFTISLINQAIVKAGGPPNVLCAIANPTIDSAQTLMKHPKIKLLVVTGGPAVVKTAMNSDKKVIAAGPGNPPCVVDETADLVKAGRDIVNGAGFDNNIVCICEKEILAVSQIADQLKEEMIKNGAHELKGEQIEKVTKLVITDPGKPGHEGAPNKKYVGKNASVIARDIGLDISEQTKILLCEVDRYHPLVWTEQLLPVIPLVRFNNVDEAIDFAVQCEHNFRHSASIHSKNIATLSRMAKLMNCSLFIKNGPNYSGLGFGGAGYTSFTIATPTGEGLTRARTFTRERRCVLVGYFRIV

SEQ ID NO: 75 - protein, 477 aa, Artificial Sequence
  AADHal
MVDQTLIEQITRAVLTQMKAGKDAAVSGDGIFATVDQAVAAARQAYQELRLLTLEKRETLIRAIRDAAFANAAVIAQMAVQESGMGRVEDKILKNQLAARKTPGTEDLTSRAWSGDHGLTLVEMAPYGVIGAITPTTNPSETVICNSIGMIAAGNSIVFSPHPTAQNTSLTTIRLLNEAIVKAGGPDNLLTAVAEPSIEAANAMMRHPGIQMLVATGGPAVVKAVLSSGKKAIGAGAGNPPAVVDETADIAKAAKDIVAGCSFDNNLPCIAEKEIIAVGRIADELISYLQKYGAYLISGRDIERLMEVVLTERTEEMAPGCVGKPRRVYGVNKDYIGKDAKFILSKINIQAPDHIRVILCETPADHPFVLEELMMPVLPLVSVRDIDAAIDLAVKVEHGNRHTAVMHSKNVDYMTRLAKAIETTIFVKNAPSYAGIGVGGEGFTTFTIAGPTGEGLTSARSFTRQRRCALVDAFSIV

SEQ ID NO: 76 - protein, 464 aa, Artificial Sequence
  AADHbs
MDEIMIKNIVREVLMKTNLDISCKSDQGVFEDVNDAIDAAYIAQRDWYMNYKVEDRRRIIEAIRVVARENAPMFAKMIHEETGMGRYEDKITKNLAVIDKTPGVECLVTDAISGDSGLMIEEQAPFGVIGAITPSTNPTETIINNTISMIGGGNAVVFNVHPGAKKVCAVCLQILHKTIVENGGPANLITMQRKPDMEAVNKLTASPKIRLMVGTGGMGMVNALLKSGKKTIGAGAGNPPVVVDDTADLDKAASEIYRGASFDNNLLCLAEKETFVMDNVADELIRKMCACGAHLITPQETEQLLKVIFLEKDGKYSVNKKWVGKDASLILESIGIKDADTRLVLCEVPHDHPFVLVEQLMPIMPIVRCKTFEDCVKYAVVAENGNRHTASMFSKNVDHMTRFAKEIETTIFTKNAATLVGVGIGGEGHTTMTIAGPTGEGLTCARSFTRRRRCMLADGGLRVI

SEQ ID NO: 77 - protein, 484 aa, Artificial Sequence
  AADHbw
MDVRQQDVERIVVEVLKKMMSDQPTAAATTVVAASGCDCGDFGLFDRLEDAVQAAEAAQKKISTVAMRDKIIAAIRKAGLENAKAFAEIAHNETGMGRVSDKIAKNILVCERTPGTECLSPMAISGDMGLTLIENAPWGVIASVTPSTNPTATVINNAISMIAGGNSVIFAPHPNAKRASQTAIQVLNKAIIEATGVANLLVAVKEPTIEVAQELFSHPRIKLLVVTGGEAVVAQARKVATMRLIAAGAGNPPVVVDETANIARAARSIYDGASFDNNIICADEKEIIAVDSIADQLKAEMKAIGAVEISLEQADAVARVVLRNYPQVEGGKAPNPNPKWVGRDAALIAKAAGIDVPDSCRLLIVDVKRDINHVFARVEQLMPVIPLLRAANVDEAIEWALILERGLSHTAGMHSRNIDNMDKMARAMNTSLFVKNGPHLAALGAGGEGWTTMTISTPTGEGVTCARSFVRLRRCCVVDNFRIV

SEQ ID NO: 78 - protein, 437 aa, Artificial Sequence
  AADHcs
MKSSIYSSVSEAVMAARGAFNRYADLTLNERKEIIEAVKAAVRPRITQLAEMTAAETGMGNVADKIEKIRLAVEKTPGVEDLITEVNTGDHGMTLYELSAFGVVCAVHPCTNPCATLISNTIGILAAGNAVVHCPHPRAVRVSQYLTGMISDAVRDVCGIDNLVVTVGESLMGSTREIMSHPDVDLIVCTGGSGPLRQAMSAGKKVIGAGPANPVAIVDETADLERAARDIVKGASFDNNLMCTSEKSIVAVEKIADELISHLERNGVYYTRSAEEIDRLYCTAVTEDFVINKKMEGQSADVILDAAKIPHRKGIKLIVAETDRTHPFATLELLMPLLPLVRARDFDEALEAALDIEQGFRHTATIHSESVERMNRAAKKLQTAVFVKNGPSLLGIGFDKEGHTSFTIGTITGEGTTSARHFARRRRCTLTSGFSIR

SEQ ID NO: 79 - protein, 485 aa, Artificial Sequence
  AADHho
MALREDRIAEIVERVLARLDGNSGSSAAPHSGSGAPAATAGGASLDIPRGTLGVYADADAAVNAARRGFAANEALPLRTRQAMIDAMRKVARAHIPELARYAVAETGLGRYEDKLAKNELVIAKTPGPEILAPVAYTGDDGLTLTERAPYGVIGAITPCTNPTETVICNAIGMLSGGNAVVFNVHPSAARVCNWLVHLLNEAIMSVGGPRDAITSVESPTIDSAQTLMTHAGVRLVVVTGGPGVVRAAMKSGKKVIAAGPGNPPAVVDETANLAKAAAAIIKGASIDNNIICTAEKEIVAVASIADELSRLLGQRGALVLGDAQVRALERVVLDGEHVNKEWVGKDASRIAEQIGLRGHGSDLRLLVCPVDEGHPFVQHELLMPVIGLVRVSDATEAMATAVRVEHGFCHTAVMHSTHIDRLSAMARVCNASIFVKNDCNLAGLGLGGEGFTSFTIASPTGEGLTTARDFTRVRRCTLKESFRFV

SEQ ID NO: 80 - protein, 467 aa, Artificial Sequence
  AADHhs
MKIKENELDKIVNQVISSLNNKQNSNDFNTKINYGIFSTMDEAIAEAVKAQACLQLNYSTEAREKIIKSIRKNVSKHVEKISEMAVEETDMGRIEDKIIKNNLAINKTPGTEDLRTEAFSGKKGLTIVEEAPFGVICSIAPVTNPTETIISNAISMIASCNGVVFNSHPGAKKVSKYIIEVLNKVIMEAGGPENLLTAVNEPTLQTVESCMRDDRIAMIVATGGPGVVNAALSSGKKAIGAGAGNPPVLVDDTVDLKRVAKDIINGASFDNNLPCTSEKAIVALESIADSLLNEMTNQNAQLVHDIKALERVILNDDGSINKALVGKDAAFILNKAGLKAKSEDLRLVIVDVDLRHPFVQKEQLMPVIPLVRAKNFNEAMEMGVDIEEGNRHTAIIHSKNVDNLTKFAKKIETTIYVKNAPSYAGIGAGGEGYATFTIAGPTGEGLTSARSFTRKRRCVLVDGFSII

SEQ ID NO: 81 - protein, 465 aa, Artificial Sequence
  AADHma1
MQTDAQQIESIVRRVIEQLHSPQRDGESYGVFRTLDDAVAGAQGAYKKIRTMAQREAIIAAIRRTGSENVQALSELAVQETGFGRVEDKIRKHRLVLDKTPGIEAIVPMAVTGDHGLSLIENAPWGVIASVTPSTNPSATILNNAISMIAAGNSVVFSPHPAARAVSQRTIQLINRASVSAGGPANLVTCVEEPTIEAATRLFSFPGIQLLTITGGEGVVNAARKVTDKRLIAAGPGNPPVVVDETADIERAAISIVQGASFDNNIICVDEKEIIAVESIATELKTAMCRHGAAEINADQADAVARLVLAGYPGPNPHPKPEWVGRDAEKIAAAAGFSVPAGTRLLVTETERDHAFATTEMMLPVISLIRARDADQAIDWAVELEAGNRHTAAMHSRNIDNLSRMGLEINCSLFVKNGPCLAGLGAGGEGWTSMTISTPTGEGVTNASTFVRKRRCTMVDSFRIV

SEQ ID NO: 82 - protein, 473 aa, Artificial Sequence
  AADHma2
MAFNEDLIASIVEQVLKEIQDDDHVIASARQSVVKANDNWGVYTDVDEAMEVVNKAQKEFAAMPISKRDEIISAIRTAGVENAEHLARIAHEVTGYGRIEDKTVKNRNAAMLTPGIEDLQKEFLSGDGGSVIVEYGPMGVIASLMPSTHPTAFVINHAIAMLAAGNAIFICPHPKAQAATLEAMKALNKAIVEAGGPKYLMVAVDKADMETSNKVYAHPYVKMVAAAGGEGVIRAALKSGKKAITGGPGNPPVVVDETADIAKAAKDIIDGESYDNNVLCIAEKEVFVVESVVDRLIAEMQKNNAYLIKGQDVANLTGVTIKDGKPNGQLVGKNPSVILKEIGIEVGDDVRTVIFEAPPEHPLVMIEQLMPVLPIVRVKDFDEAVKWAVKAEHGDGHTAILHSNNINRITEYARAMQVTVLVVNAPSYSCMDPQSKTLVYAHTLTGPTGEGFCTPRHFTRQERIVLGGAFHFV

SEQ ID NO: 83 - protein, 478 aa, Artificial Sequence
  AADHmm
MDQKEIENVVKAVLASMSAGTQPAAASAAPQQAAASQNNGFGVFESLDDAVLAAKEAQKSLKTVEMRNLCIGAIRRAATEHARELAVLAVEETGMGRVEDKLAKNLAQANGTPGVECLRPEVLTGDHGLTLIENAAWGVIASVTPSTNPAATAINNAISMIAGGNSVIFAPHPAAKKVSQRTITILNEAIVAAGGPNNLLVTVAKPDIETAQRLFKYPGIGLLVVTGGDAVVESARKHTNKRLIAAGAGNPPVVVDETADIERAAKAIVHGASFDNNIICADEKVLIAVDCIADKLITEMQRNHAVLLTREQSEKLIPVLLKNVDETGHGTVSRDWVGRDAAKIAAAIGMTVPADTRLLIAETDCKHPFAVTELMMPVLPIIRVKDVDQAIDLAVKLEGGCHHTAAMHSNNISNLNRMANAIDTSIFVKNGPCIAGLGLGGEGWTTMTITTPTGEGVTCARTFVRLRRCTMVDSFRIV

SEQ ID NO: 84 - protein, 477 aa, Artificial Sequence
  AADHpa
MEIQNLEEDIRRILSEELKKSGTSQTASTSDAGQNGIFKTVDEAIAAAKAAEDVYIDKTLAFREKVLTAIREGFRPYIEKMAKDIKDETGMGTVEAKIAKLNNALYNTPGTEILQPEAETGDGGLVMYEYAPFGVIGAVGPSTNPSETVIANAIMMLAGGNTLYFGAHPGAKKITRWTIEKLNELVYEATGMKNLVVSIEEPSIESVQEMMQHPDIAMLSITGGPAVVHQALVSGKKAVGAGAGNPPAIVDATANVALAAHNIVDSASFDNNILCTAEKEVVVESSVKDELIKKMQEEGAFLVTNASDIDKLAEMTIGKNGAPDRQFVGKDATYILDKAGIAYTGTPKLIILEAQKDHPLVTTEMLMPIVPVVSCPTFDQVLATAVEVEQGLHHTASIHSENLPNINRAAHRMNTSIFVVNGATYVGTGVGANGAHAGASALTIATPTGEGTATAKTFTRRRRLNSPEAFSLRSWEA

SEQ ID NO: 85 - protein, 477 aa, Artificial Sequence
  AADHpb
MQTTEATIRNVVQEVLAQLAKQSNGSNGVPRAERKAGDWGVFDDTDQAIAAANEGFRALSSKGMEERAKIVEIVKRICADQAEELGRLEFQETKVGRLDHKIEKLQIIKKVPGTEWLRTEAMSGDHGLTVIEYAPFGVIGTITPVTHSLPTLAGNVINMVAAGNTLVVNPHPSGKKIACEGVRRFNRAIYAATGLENVITIVSNPTLESADRIFNHRDVKMLCVTGGPGVARAAMASRKKAVVAGPGNPPVLVDESACLQNAAESIIAGAGYDNNLLCIGEKEVFVVESVFDRFMQEMDKAGAVRLNASQVDQLSKVAFTPPENEKDHYHVNRDLVGQHPYVLAKQIGLPLPESTPLLFGETDEHNPFVAEEQMMPFVPIVRCRNAEHGMDLCEKYEHGFRHTSLIHSRNVRNMSIMGKRMDTTLFIKNGPSPAGLGLGGEGYLSFSIATPTGEGVTTPLTFTRQRRCTMVDDLRIV

SEQ ID NO: 86 - protein, 452 aa, Artificial Sequence
  AADHpe
MEIKEMVALARKAQKEYQATHNQQSVDNICRAAAKVIYENAEMLAREAVDETGMGVYEDKVSKNRGKSKGVWYNLHDKKSVGILNIDERTGMIEIAKPMGVVGAVTPTTNPIVTPMSNIIFALKTCNAIIISPHPRSKKCSKHAVDLILEAIKPFNVPEGMVQVIEEPSIEMTQQLMGAVDVVVATGGMAMVKSAYSSGKPSYGVGAGNVQVIFDSDIDFEDAAEKVIYGRSYDNGIICTGEQSVIYNEADKDAVFAALRKRGAYICTEEEGKKMRDLLFQNGGPINKDVVGQGVQKIAKMAGINVPEGSRVIIVEANGVGEEDVICREKMCPVMCALSYKHFEEGVDIACRNLANEGNGHSCAIHSNNQAHIILTGSKATVSRIVVNAPSATTAGGHIQNGLNVTNTLGCGSWGNNSISENFTYKHLMNISRIAPLNPAIKVPNDQEIWEL

SEQ ID NO: 87 - protein, 460 aa, Artificial Sequence
  AADHrw
MTVTATLDADLAALADVRAQVSATKKAFDAIEGADQQWLDEIVRAMAKAGYDASEELARMAVDETGYGVYENKIIKNRFNTGFVADWMLERRAVGVLWADEENKVTAVGSPMGVIAAIIPVTNPTATVLFKSLASVKAGNAVVHAPHPRAARCSARAAEIMAEAAVHAGAPENLVSCLRQPTLDATRELMRHGDIRLVLATGGPAMVAAAYSSGKPTIAVGAGNVPAYVDSTVKDLAETATMIVTSKSFDNGTACVAEQSVVIAAPVADQLVQELGRAGATWMTKDQQAALTRTLFDERGGLRANAVGQSAVRLAEMSGFTVPASTKVLAAELDEVGDHVLLSREILGPVLTVYREPDYQAGWRRCREILALGGEGHTVAVHTSDPEVVAKFGELPAGRIVVNTPALFGGMGYSTNVDPSFQIGTGTWSGSICSDNVTPLHLVNIKRIAHEARPWRGVFD

SEQ ID NO: 88 - protein, 871 aa, Artificial Sequence
  AADHsl
MAIEEHSLNDKESKKETLEETIDLLVTNAKTASEEFTPLDQQQIDEIVRQMALAGLDQHMQLAKMAVEETKRGVYEDKMIKNIFATEYIYNSIKKNKTVGVISEDPYEEIVQIAEPIGVIAGVTPVTNPTSTTMFKSLISIKTKNPIIFAFHPSAQKCSAAAAKVVRDAAVKAGAPKNCIQWIETPSLEATQRLMHHPGVSLILATGGSGMVKAAYSSGKPAIGVGPGNVPAYIEKSADVKQAVNDLILSKTFDNGMICASEQAVIVDQQIYEAVKKEMIDNKCYFLNNEEKKKVEKLVIDERRCAVNPQIVGKTAAFIAGLAGVTVPEDTKVIVAELSSVGPESPLSREKLSPVLACFRAKTTEEGFKRCEEMLAFGGIGHSAVIHSNDQKVIDAFAMRMKAGRLIVNAPSSLGGIGDIYNHFIPSLTLGCGSYGGNSVSTNVGTANLINIKTLANRRNNMQWFKVPPKIYFEKNATKYLSVMPDITRAFIVADPGMVKFGYVDRVIHFLKQRRDPVHYEVFSDVEPDPSVATVMKGTELMRKFEPDVIIALGGGSAMDAAKGMWLFYESPETDFFGLKQKFLDIRKRVFKFPDLGKKAKFVAIPTTSGTGSEVTSFSVITDKENDMKYPLADYALTPNVAIIDPEFVLTVPQRVLADSGMDVLTHAIEAYVSNMANDFTDGLCIKAIQLVFKYLPRSYKDSTDREAKEKMHNASTIAGMAFSNAFLGINHSLAHKLGNEFHLAHGRCCAILLPHVIRFNAQKPTKFAAFPKYKHFIADERYAEIAQVLGIAGKTTEESVENLVQAIKKLTQELNMPMSIEKNGVSKEAFEAAVDKLADRAFGDQCTPANPKMPLVSELTEIYRQAFKGI

SEQ ID NO: 89 - protein, 462 aa, Artificial Sequence
  AADHss
MADEQLVQNVVREVVARMQISAPARGMHGVFSDMEEAIEAARTAQQTVRLLPMDQREKIIGAIRRKTRENAEILARMAVNETGMGNVGDKILKHLLVADKVPGTEDISTRAFSGDRGLTLIEMGPFGVIGAITPCTNPSETVLCNTIGMLAGGNTVVFNPHPQAIKTTLFTIQMVNEASLEAGGPDNIACTVDAPTLATSEIMMKSPHIKLLVATGGPGVVTAVLSSGKRAIGAGAGNPPALVDETADIRKAAEDIVNGCTFDNNLPCIAEKEIVAVDSIADELLHYMLTEQGCYQASEEELDRLTKAVMDEKGRLNRKAVGRSARKLLSMIGVEVDANIRCITFFGPKEHPLITTELMMPILGIVRVKDFAEGLETAAWLEHGNKHSAHIHSKNVDRITEYARRLDTTITVKNGPSYAALGFGGESYCTFTIASRTGEGLTSARSFIKSRHCVMTDSLCVR

SEQ ID NO: 90 - protein, 467 aa, Artificial Sequence
  AADHta
MNNTELESLIRTILTEQLTPSATDTPACTASSVALFDDVDSAICAAHAAFLRYQEAPLKTRSAIIAAIRAEIAPCLSELAERAAAETGMGNTADKILKNKAALENTPGIEDLKTTALTGDEGMVLFEYSPFGVVGAVAPSTNPTETIINNSISMLAAGNAIYFSPHPGAKNISLWLIQKMEEIAFKVCGIHNLIVTVKEPTFEATQQMMAHDKIALLAITGGPGIVNMGLKSGKKVIGAGAGNPPCLVDETAEIVKAAQDIVAGASFDYNLPCIAEKSVIAVDCIADQLIQQMREFGAMQITDPQQIAQLREVCIQKGAANKSLVGKSPATILAAAGIPCPAKEPRLIILEVPANDPFVVTEQLMPVLPIVRVDNFEQGLQLALKVEDGLHHTAMMHSQNVSRLNKAAHLMQTSIFVKNGPSYAGIGVGAEGFTTFTIATPTGEGTTSARTFGRLRRCVLTNGFSIR

SEQ ID NO: 91 - protein, 474 aa, Artificial Sequence
  AADHtl
MVDIDLKNVEQIVRTVLASMQTQPQAVQPAAGRRAAPGVFTELDDAVAEASTAQRAIRNLATRVKVVEAIRKAAEAHARELAELAVAETGMGRVEDKFAKNVSQARHTPGVECLAPTALTGDRGLTLIENAAWGVIASVTPSTNPAATIINNAISMISAGNTVVFAPHPAAKKVSQRTVSLLNEASVAAGGPDNVVTTVLNPDIATAQRLFSYPGIHLLTVTGGEAVVEAARKHTDKRLIAAGAGNPPVVVDETADLARAARDIVWGASFDNNIICVDEKEIIVVDRVCDALKTEMARHKAVELTPDQGKRLVDVLLNYVGADGRGTVSRDWVGRDAAKIAAAIGLEVPADTRLLYIETPADHPFAVTELMMPVIPVVRAPDVDAAIDLAVKLEGNCRHTAAMHSRNIDALDRMANAINTSIFVKNGPCLAGLGFGGEGWTTMTISTPTGEGVTSARTFVRLRRCVLVDHFRIV

SEQ ID NO: 92 - protein, 912 aa, Artificial Sequence
  AADHtm
MDTAVAVQKQDIAMSAASKPKSASGPPFDVQAHVDGLVARAIRALAEFQALDQEQVDRIVAKASVAALNQHGVLAKLAVEETGRGLFEDKAVKNMFACENVTSAMKRMKTVGVIHRDNLNGIVEIAEPVGVVAAVTPVTNPTSTAIFKALVCLKTRNPIVFGFHPHAQKCSAEAVRIVRDAAVAAGAPTNCAQWIEVPSIKATGALMNHPDISVILATGGDAMVKAAYSCGKPAIGVGPGNVPAFVEKTADVARAAYDLVLSKSFDYGMVCASEQAAIIEAPVYDQAMAEMQRLHAHVATSDEKRKLEELAFGVVANSENCGSAKLNPAIVGKSASWLAKQAGFSVPQDTSILLVEADHVGYDEPLTREKLCPILAVIRARDADDGIRLSEQMVEQDGLGHSACIHSTDEEVIEKFGRRIKAVRIITNSPTSLGGIGDIYNAFVPSLTLGCGTYGKNSVSNNVQAVNLINVKRIGHRNNNIQWFKVPAKIYFEPNAIRYLADMRRVNRVFIVTDATMSKLGVVDRIRDVLNRRLNMVTMQVVDTIDSEPSISMVEVGAEQMRNFQPDTIVALGGGSAMDAAKVMWLLYEHPEVSFSDVREKCFDVRKRAFTFPDLGEKAQLVCISTTSGTGSEVTPFACITDPKTGYKYQLTDYALMPTVAIVDPTLVNAMPSRLAADSGMDALARATEAYVSVYANDFTDGLAMQAIKLIFENLPASVLKGDAKAREKMHNAGTIAGMASGSAFLGIVHAITHTIGASYRISQGRSNATLLPLGIRYNGRIPTKLTSWPKYEKYVAPQRYQDIAKMLGLPAATPEEGVESYARAVEDLRATLNMEYSFRAQGIEEHDFVANLDEMAFRASDDQSAPANPRLPMVEDLKIIMEAAYYGISFDDIVARRASAQLAKSEVSKKG

SEQ ID NO: 93 - protein, 532 aa, Artificial Sequence
  AADHvs
MNEQEIAHAVENVLSKYTNVTAQNAEPVSYSSNASLENIVSQALAGNMVKQPETQTAPDLNSNIENIVSQILAENQAKPQSVQCQSANHGTTEYLGCFASMEEAISAASHAQVQYRHCTMGDRASFVKGIREVFTQDDVLEKISRMAVEETGMGNYADKLTKNRIAATKTPGIEDLTTSALSGDSGLTLTEFSAYGVIGSITPTTNPTETIINNSIGMLAAGNTVVYSPHPRSRNVSLVAVDLINRKLAELGAPANLVVTVLEPSIDNTNAMMNDPRVNMLVATGGPSIVKTVMSTGKKAIGAGAGNPPAVVDETANIEKAAKDIINGCAFDNNLPCIAEKEVIVVNEVADYLIHCMKKSGAYLLCDKQKIQQLQSLVLNEKGTGPNTSFVGKGARYILDKLNIQVSDDIKVILIETERNHPFVVHELMMPILPVVRVENVDEAIDLAIKVEHGNRHTAIMHSTNVEKLSKMARLIQTTIFVKNGPSYSGIGVGGEGHTTFTIAGPTGEGITSARSFARYRRCVMVEALNIR

SEQ ID NO: 94 - protein, 891 aa, Artificial Sequence
  ADHEec
MAVTNVAELNALVERVKKAQREYASFTQEQVDKIFRAAALAAADARIPLAKMAVAESGMGIVEDKVIKNHFASEYIYNAYKDEKTCGVLSEDDTFGTITIAEPIGIICGIVPTTNPTSTAIFKSLISLKTRNAIIFSPHPRAKDATNKAADIVLQAAIAAGAPKDLIGWIDQPSVELSNALMHHPDINLILATGGPGMVKAAYSSGKPAIGVGAGNTPVVIDETADIKRAVASVLMSKTFDNGVICASEQSVVVVDSVYDAVRERFATHGGYLLQGKELKAVQDVILKNGALNAAIVGQPAYKIAELAGFSVPENTKILIGEVTVVDESEPFAHEKLSPTLAMYRAKDFEDAVEKAEKLVAMGGIGHTSCLYTDQDNQPARVSYFGQKMKTARILINTPASQGGIGDLYNFKLAPSLTLGCGSWGGNSISENVGPKHLINKKTVAKRAENMLWHKLPKSIYFRRGSLPIALDEVITDGHKRALIVTDRFLFNNGYADQITSVLKAAGVETEVFFEVEADPTLSIVRKGAELANSFKPDVIIALGGGSPMDAAKIMWVMYEHPETHFEELALRFMDIRKRIYKFPKMGVKAKMIAVTTTSGTGSEVTPFAVVTDDATGQKYPLADYALTPDMAIVDANLVMDMPKSLCAFGGLDAVTHAMEAYVSVLASEFSDGQALQALKLLKEYLPASYHEGSKNPVARERVHSAATIAGIAFANAFLGVCHSMAHKLGSQFHIPHGLANALLICNVIRYNANDNPTKQTAFSQYDRPQARRRYAEIADHLGLSAPGDRTAAKIEKLLAWLETLKAELGIPKSIREAGVQEADFLANVDKLSEDAFDDQCTGANPRYPLISELKQILLDTYYGRDYVEGETAAKKEAAPAKAEKKAKKSA

SEQ ID NO: 95 - protein, 885 aa, Artificial Sequence
  ADHEpm
MSGLQMFQNLSLYGSLAEIDTSEKLNEAMDKLTAAQEQFREYNQEQVDKIFKAVALAASQNRVAFAKYAHEETQKGVFEDKVIKNEFAADYIYHKYCNDKTAGIIEYDEANGLMEIAEPVGPVVGIAPVTNPTSTIIYKSLIALKTRNCIIFSPHPGAHKASVFVVKVLHQAAVKAGAPENCIQIIFPKMDLTTELLHHQKTRFIWATGGPGLVHASYTSGKPALGGGPGNAPALIDETCDMNEAVGSIVVSKTFDCGMICATENAVVVVESVYENFVATMKKRGAYFMTPEETKKASNLLFGEGMRLNAKAVGQTAKTLAEMAGFEVPENTVVLCGEASEVKFEEPMAHEKLTTILGIYKAKDFDDGVRLCKELVTFGGKGHTAVLYTNQNNKDRIEKYQNEVPAFHILVDMPSSLGCIGDMYNFRLAPALTITCGTMGGGSSSDNIGPKHLLNIKRVGMRRENMLWFKIPKSVYFKRAILSEALSDLRDTHKRAIIITDRTMTMLGQTDKIIKACEGHGMVCTVYDKVVPDPTIKCIMEGVNEMNVFKPDLAIALGGGSAMDAAKMMRLFYEYPDQDLQDIATRFVDIRKRVVGCPKLGRLIKTLVCIPTTSGTGAEVTPFAVVTSEEGRKYPLVDYELTPDMAIVDPEFAVGMPKRLTSWTGIDALTHAIESYVSIMATDFTRPYSLRAVGLIFESLSLAYNNGKDIEAREKMHNASAIAGMAFANAFLGCCHSVAHQLGSVYHIPHGLANALMLSHIIKYNATDSPVKMGTFPQYKYPQAMRHYAEIAELLLPPTQVVKMTDVDKVQYLIDRVEQLKADVGIPKSIKETGMVTEEDFFNKVDQVAIMAFDDQCTGANPRYPLVSELKQLMIDAWNGVVPKL

SEQ ID NO: 96 - protein, 459 aa, Artificial Sequence
  EUTEdz
MEHSVIEPTVPMPLPAMFDAPSGIFSSLDDAVQAATLAQQQLSSVELRQQVIKAIRVAGERYAQVLAEMAVAETGMGRVVDKYIKNVSQARHTPGIECLSAEVLTGDNGLTLIENAPWGVVASVTPSTNPAATVINNAISMIAAGNSVVFAPHPSAKNVSLRTISLLNKAIVATGGPENLLVSVANPNIETAQRLFRYPGIGLLVVTGGEAVVEAARKHTDKRLIAAGAGNPPVVVDETADIPKAARAIVKGASFDNNIICADEKVLIVVDRVADALLAEMQRNNAVLLTPEQTERLLPALLSDIDEQGKGRVNRDYVGRDAAKLAAAIGLEVSEHTRLLLAETDADHPFAVTELMMPVLPVIRVKNVDDAIALAVKLESGCRHTAAMHSTNIRNLNRMANAINTSIFVKNGPCIAGLGLGGEGWTSMTISTPTGEGVTSARTFVRLRRCVLVDMFRIA

SEQ ID NO: 97 - protein, 467 aa, Artificial Sequence
  EUTEec
MNQQDIEQVVKAVLLKMQSSDTPPAAVHEMGVFASLDDAVAAAKVAQQGLKSVAMRQLAIAAIREAGEKHARDLAELAVSETGMGRVEDKFAKNVAQARGTPGVECLSPQVLTGDNGLTLIENAPWGVVASVTPSTNPAATLINNAISLIAAGNSVIFAPHPAAKKVSQRAITLLNQAIVAAGGPENLLVTVANPDIETAQRLFKFPGIGLLVVTGGEAVVEAARKHTNKRLIAAGAGNPPVVVDETADLARAAQSIVKGASFDNNIICADEKVLIVVDSVADELMRLMEGQHAVKLTAEQAQQLQPVLLKNIDERGKGTVSRDWVGRDAAKIAAAIGLNVPQETRLLFVETTAEHPFAVTELMMPVLPVVRVANVADAIALAVKLEGGCHHTAAMHSRNIENMNQMANAIDTSIFVKNGPCIAGLGLGGEGWTTMTITTPTGEGVTSARTFVRLRRCVLVDAFRIV

SEQ ID NO: 98 - protein, 469 aa, Artificial Sequence
  LIN1129li
MESLELEQLVKKVLLEKLAEQKEVPTKTTTQGAKSGVFDTVDEAVQAAVIAQNCYKEKSLEERRNVVKAIREALYPEIETIATRAVAETGMGNVTDKILKNTLAIEKTPGVEDLYTEVATGDNGMTLYELSPYGVIGAVAPSTNPTETLICNSIGMLAAGNAVFYSPHPGAKNISLWLIEKLNTIVRDSCGIDNLIVTVAKPSIQAAQEMMNHPKVPLLVITGGPGVVLQAMQSGKKVIGAGAGNPPSIVDETANIEKAAADIVDGASFDHNILCIAEKSVVAVDSIADFLLFQMEKNGALHVTNPSDIQKLEKVAVTDKGVTNKKLVGKSATEILKEAGIACDFTPRLIIVETEKSHPFATVELLMPIVPVVRVPDFDEALEVAIELEQGLHHTATMHSQNISRLNKAARDMQTSIFVKNGPSFAGLGFRGEGSTTFTIATPTGEGTTTARHFARRRRCVLTDGFSIR

SEQ ID NO: 99 - protein, 2233 aa, Artificial Sequence
  ACC1sc_S659A
MSEESLFESSPQKMEYEITNYSERHTELPGHFIGLNTVDKLEESPLRDFVKSHGGHTVISKILIANNGIAAVKEIRSVRKWAYETFGDDRTVQFVAMATPEDLEANAEYIRMADQYIEVPGGTNNNNYANVDLIVDIAERADVDAVWAGWGHASENPLLPEKLSQSKRKVIFIGPPGNAMRSLGDKISSTIVAQSAKVPCIPWSGTGVDTVHVDEKTGLVSVDDDIYQKGCCTSPEDGLQKAKRIGFPVMIKASEGGGGKGIRQVEREEDFIALYHQAANEIPGSPIFIMKLAGRARHLEVQLLADQYGTNISLFGRDCSVQRRHQKIIEEAPVTIAKAETFHEMEKAAVRLGKLVGYVSAGTVEYLYSHDDGKFYFLELNPRLQVEHPTTEMVSGVNLPAAQLQIAMGIPMHRISDIRTLYGMNPHSASEIDFEFKTQDATKKQRRPIPKGHCTACRITSEDPNDGFKPSGGTLHELNFRSSSNVWGYFSVGNNGNIHSFSDSQFGHIFAFGENRQASRKHMVVALKELSIRGDFRTTVEYLIKLLETEDFEDNTITTGWLDDLITHKMTAEKPDPTLAVICGAATKAFLASEEARHKYIESLQKGQVLSKDLLQTMFPVDFIHEGKRYKFTVAKSGNDRYTLFINGSKCDIILRQLADGGLLIAIGGKSHTIYWKEEVAATRLSVDSMTTLLEVENDPTQLRTPSPGKLVKFLVENGEHIIKGQPYAEIEVMKMQMPLVSQENGIVQLLKQPGSTIVAGDIMAIMTLDDPSKVKHALPFEGMLPDFGSPVIEGTKPAYKFKSLVSTLENILKGYDNQVIMNASLQQLIEVLRNPKLPYSEWKLHISALHSRLPAKLDEQMEELVARSLRRGAVFPARQLSKLIDMAVKNPEYNPDKLLGAVVEPLADIAHKYSNGLEAHEHSIFVHFLEEYYEVEKLFNGPNVREENIILKLRDENPKDLDKVALTVLSHSKVSAKNNLILAILKHYQPLCKLSSKVSAIFSTPLQHIVELESKATAKVALQAREILIQGALPSVKERTEQIEHILKSSVVKVAYGSSNPKRSEPDLNILKDLIDSNYVVFDVLLQFLTHQDPVVTAAAAQVYIRRAYRAYTIGDIRVHEGVTVPIVEWKFQLPSAAFSTFPTVKSKMGMNRAVSVSDLSYVANSQSSPLREGILMAVDHLDDVDEILSQSLEVIPRHQSSSNGPAPDRSGSSASLSNVANVCVASTEGFESEEEILVRLREILDLNKQELINASIRRITFMFGFKDGSYPKYYTFNGPNYNENETIRHIEPALAFQLELGRLSNFNIKPIFTDNRNIHVYEAVSKTSPLDKRFFTRGIIRTGHIRDDISIQEYLTSEANRLMSDILDNLEVTDTSNSDLNHIFINFIAVFDISPEDVEAAFGGFLERFGKRLLRLRVSSAEIRIIIKDPQTGAPVPLRALINNVSGYVIKTEMYTEVKNAKGEWVFKSLGKPGSMHLRPIATPYPVKEWLQPKRYKAHLMGTTYVYDFPELFRQASSSQWKNFSADVKLTDDFFISNELIEDENGELTEVEREPGANAIGMVAFKITVKTPEYPRGRQFVVVANDITFKIGSFGPQEDEFFNKVTEYARKRGIPRIYLAANSGARIGMAEEIVPLFQVAWNDAANPDKGFQYLYLTSEGMETLKKFDKENSVLTERTVINGEERFVIKTIIGSEDGLGVECLRGSGLIAGATSRAYHDIFTITLVTCRSVGIGAYLVRLGQRAIQVEGQPIILTGAPAINKMLGREVYTSNLQLGGTQIMYNNGVSHLTAVDDLAGVEKIVEWMSYVPAKRNMPVPILETKDTWDRPVDFTPTNDETYDVRWMIEGRETESGFEYGLFDKGSFFETLSGWAKGVVVGRARLGGIPLGVIGVETRTVENLIPADPANPNSAETLIQEPGQVWHPNSAFKTAQAINDFNNGEQLPMMILANWRGFSGGQRDMFNEVLKYGSFIVDALVDYKQPIIIYIPPTGELRGGSWVVVDPTINADQMEMYADVNARAGVLEPQGMVGIKFRREKLLDTMNRLDDKYRELRSQLSNKSLAPEVHQQISKQLADRERELLPIYGQISLQFADLHDRSSRMVAKGVISKELEWTEARRFFFWRLRRRLNEEYLIKRLSHQVGEASRLEKIARIRSWYPASVDHEDDRQVATWIEENYKTLDDKLKGLKLESFAQDLAKKIRSDHDNAIDGLSEVIKMLSTDDKEKLLKTLK

SEQ ID NO: 100 - protein, 2233 aa, Artificial Sequence
  ACC1sc_S659A/S1157A
MSEESLFESSPQKMEYEITNYSERHTELPGHFIGLNTVDKLEESPLRDFVKSHGGHTVISKILIANNGIAAVKEIRSVRKWAYETFGDDRTVQFVAMATPEDLEANAEYIRMADQYIEVPGGTNNNNYANVDLIVDIAERADVDAVWAGWGHASENPLLPEKLSQSKRKVIFIGPPGNAMRSLGDKISSTIVAQSAKVPCIPWSGTGVDTVHVDEKTGLVSVDDDIYQKGCCTSPEDGLQKAKRIGFPVMIKASEGGGGKGIRQVEREEDFIALYHQAANEIPGSPIFIMKLAGRARHLEVQLLADQYGTNISLFGRDCSVQRRHQKIIEEAPVTIAKAETFHEMEKAAVRLGKLVGYVSAGTVEYLYSHDDGKFYFLELNPRLQVEHPTTEMVSGVNLPAAQLQIAMGIPMHRISDIRTLYGMNPHSASEIDFEFKTQDATKKQRRPIPKGHCTACRITSEDPNDGFKPSGGTLHELNFRSSSNVWGYFSVGNNGNIHSFSDSQFGHIFAFGENRQASRKHMVVALKELSIRGDFRTTVEYLIKLLETEDFEDNTITTGWLDDLITHKMTAEKPDPTLAVICGAATKAFLASEEARHKYIESLQKGQVLSKDLLQTMFPVDFIHEGKRYKFTVAKSGNDRYTLFINGSKCDIILRQLADGGLLIAIGGKSHTIYWKEEVAATRLSVDSMTTLLEVENDPTQLRTPSPGKLVKFLVENGEHIIKGQPYAEIEVMKMQMPLVSQENGIVQLLKQPGSTIVAGDIMAIMTLDDPSKVKHALPFEGMLPDFGSPVIEGTKPAYKFKSLVSTLENILKGYDNQVIMNASLQQLIEVLRNPKLPYSEWKLHISALHSRLPAKLDEQMEELVARSLRRGAVFPARQLSKLIDMAVKNPEYNPDKLLGAVVEPLADIAHKYSNGLEAHEHSIFVHFLEEYYEVEKLFNGPNVREENIILKLRDENPKDLDKVALTVLSHSKVSAKNNLILAILKHYQPLCKLSSKVSAIFSTPLQHIVELESKATAKVALQAREILIQGALPSVKERTEQIEHILKSSVVKVAYGSSNPKRSEPDLNILKDLIDSNYVVFDVLLQFLTHQDPVVTAAAAQVYIRRAYRAYTIGDIRVHEGVTVPIVEWKFQLPSAAFSTFPTVKSKMGMNRAVAVSDLSYVANSQSSPLREGILMAVDHLDDVDEILSQSLEVIPRHQSSSNGPAPDRSGSSASLSNVANVCVASTEGFESEEEILVRLREILDLNKQELINASIRRITFMFGFKDGSYPKYYTFNGPNYNENETIRHIEPALAFQLELGRLSNFNIKPIFTDNRNIHVYEAVSKTSPLDKRFFTRGIIRTGHIRDDISIQEYLTSEANRLMSDILDNLEVTDTSNSDLNHIFINFIAVFDISPEDVEAAFGGFLERFGKRLLRLRVSSAEIRIIIKDPQTGAPVPLRALINNVSGYVIKTEMYTEVKNAKGEWVFKSLGKPGSMHLRPIATPYPVKEWLQPKRYKAHLMGTTYVYDFPELFRQASSSQWKNFSADVKLTDDFFISNELIEDENGELTEVEREPGANAIGMVAFKITVKTPEYPRGRQFVVVANDITFKIGSFGPQEDEFFNKVTEYARKRGIPRIYLAANSGARIGMAEEIVPLFQVAWNDAANPDKGFQYLYLTSEGMETLKKFDKENSVLTERTVINGEERFVIKTIIGSEDGLGVECLRGSGLIAGATSRAYHDIFTITLVTCRSVGIGAYLVRLGQRAIQVEGQPIILTGAPAINKMLGREVYTSNLQLGGTQIMYNNGVSHLTAVDDLAGVEKIVEWMSYVPAKRNMPVPILETKDTWDRPVDFTPTNDETYDVRWMIEGRETESGFEYGLFDKGSFFETLSGWAKGVVVGRARLGGIPLGVIGVETRTVENLIPADPANPNSAETLIQEPGQVWHPNSAFKTAQAINDFNNGEQLPMMILANWRGFSGGQRDMFNEVLKYGSFIVDALVDYKQPIIIYIPPTGELRGGSWVVVDPTINADQMEMYADVNARAGVLEPQGMVGIKFRREKLLDTMNRLDDKYRELRSQLSNKSLAPEVHQQISKQLADRERELLPIYGQISLQFADLHDRSSRMVAKGVISKELEWTEARRFFFWRLRRRLNEEYLIKRLSHQVGEASRLEKIARIRSWYPASVDHEDDRQVATWIEENYKTLDDKLKGLKLESFAQDLAKKIRSDHDNAIDGLSEVIKMLSTDDKEKLLKTLK

SEQ ID NO: 101 - protein, 2233 aa, Artificial Sequence
  ACC1sc_S1157A
MSEESLFESSPQKMEYEITNYSERHTELPGHFIGLNTVDKLEESPLRDFVKSHGGHTVISKILIANNGIAAVKEIRSVRKWAYETFGDDRTVQFVAMATPEDLEANAEYIRMADQYIEVPGGTNNNNYANVDLIVDIAERADVDAVWAGWGHASENPLLPEKLSQSKRKVIFIGPPGNAMRSLGDKISSTIVAQSAKVPCIPWSGTGVDTVHVDEKTGLVSVDDDIYQKGCCTSPEDGLQKAKRIGFPVMIKASEGGGGKGIRQVEREEDFIALYHQAANEIPGSPIFIMKLAGRARHLEVQLLADQYGTNISLFGRDCSVQRRHQKIIEEAPVTIAKAETFHEMEKAAVRLGKLVGYVSAGTVEYLYSHDDGKFYFLELNPRLQVEHPTTEMVSGVNLPAAQLQIAMGIPMHRISDIRTLYGMNPHSASEIDFEFKTQDATKKQRRPIPKGHCTACRITSEDPNDGFKPSGGTLHELNFRSSSNVWGYFSVGNNGNIHSFSDSQFGHIFAFGENRQASRKHMVVALKELSIRGDFRTTVEYLIKLLETEDFEDNTITTGWLDDLITHKMTAEKPDPTLAVICGAATKAFLASEEARHKYIESLQKGQVLSKDLLQTMFPVDFIHEGKRYKFTVAKSGNDRYTLFINGSKCDIILRQLSDGGLLIAIGGKSHTIYWKEEVAATRLSVDSMTTLLEVENDPTQLRTPSPGKLVKFLVENGEHIIKGQPYAEIEVMKMQMPLVSQENGIVQLLKQPGSTIVAGDIMAIMTLDDPSKVKHALPFEGMLPDFGSPVIEGTKPAYKFKSLVSTLENILKGYDNQVIMNASLQQLIEVLRNPKLPYSEWKLHISALHSRLPAKLDEQMEELVARSLRRGAVFPARQLSKLIDMAVKNPEYNPDKLLGAVVEPLADIAHKYSNGLEAHEHSIFVHFLEEYYEVEKLFNGPNVREENIILKLRDENPKDLDKVALTVLSHSKVSAKNNLILAILKHYQPLCKLSSKVSAIFSTPLQHIVELESKATAKVALQAREILIQGALPSVKERTEQIEHILKSSVVKVAYGSSNPKRSEPDLNILKDLIDSNYVVFDVLLQFLTHQDPVVTAAAAQVYIRRAYRAYTIGDIRVHEGVTVPIVEWKFQLPSAAFSTFPTVKSKMGMNRAVAVSDLSYVANSQSSPLREGILMAVDHLDDVDEILSQSLEVIPRHQSSSNGPAPDRSGSSASLSNVANVCVASTEGFESEEEILVRLREILDLNKQELINASIRRITFMFGFKDGSYPKYYTFNGPNYNENETIRHIEPALAFQLELGRLSNFNIKPIFTDNRNIHVYEAVSKTSPLDKRFFTRGIIRTGHIRDDISIQEYLTSEANRLMSDILDNLEVTDTSNSDLNHIFINFIAVFDISPEDVEAAFGGFLERFGKRLLRLRVSSAEIRIIIKDPQTGAPVPLRALINNVSGYVIKTEMYTEVKNAKGEWVFKSLGKPGSMHLRPIATPYPVKEWLQPKRYKAHLMGTTYVYDFPELFRQASSSQWKNFSADVKLTDDFFISNELIEDENGELTEVEREPGANAIGMVAFKITVKTPEYPRGRQFVVVANDITFKIGSFGPQEDEFFNKVTEYARKRGIPRIYLAANSGARIGMAEEIVPLFQVAWNDAANPDKGFQYLYLTSEGMETLKKFDKENSVLTERTVINGEERFVIKTIIGSEDGLGVECLRGSGLIAGATSRAYHDIFTITLVTCRSVGIGAYLVRLGQRAIQVEGQPIILTGAPAINKMLGREVYTSNLQLGGTQIMYNNGVSHLTAVDDLAGVEKIVEWMSYVPAKRNMPVPILETKDTWDRPVDFTPTNDETYDVRWMIEGRETESGFEYGLFDKGSFFETLSGWAKGVVVGRARLGGIPLGVIGVETRTVENLIPADPANPNSAETLIQEPGQVWHPNSAFKTAQAINDFNNGEQLPMMILANWRGFSGGQRDMFNEVLKYGSFIVDALVDYKQPIIIYIPPTGELRGGSWVVVDPTINADQMEMYADVNARAGVLEPQGMVGIKFRREKLLDTMNRLDDKYRELRSQLSNKSLAPEVHQQISKQLADRERELLPIYGQISLQFADLHDRSSRMVAKGVISKELEWTEARRFFFWRLRRRLNEEYLIKRLSHQVGEASRLEKIARIRSWYPASVDHEDDRQVATWIEENYKTLDDKLKGLKLESFAQDLAKKIRSDHDNAIDGLSEVIKMLSTDDKEKLLKTLK

SEQ ID NO: 102 - protein, 2248 aa, Artificial Sequence; identical to SEQ ID NO: 1
  ACC1ke

SEQ ID NO: 103 - protein, 2216 aa, Artificial Sequence
  ACC1mc
MVEHKSLPGHFLGGNSLESAPQGPVKDFVQAHEGHTVISKVLIANNGMAAMKEIRSVRKWAYETFGNERAIEFTVMATPEDLKANAEYIRMADNFVEVPGGSNNNNYANVELIVDVAERTAVHAVWAGWGHASENPRLPEMLAKSKHKCLFIGPPASAMRSLGDKISSTIVAQSAQVPTMGWSGDGITETEFDAAGHVIVPDNAYNEACVKTAEQGLKAAEKIGFPVMIKASEGGGGKGIRMVKDGSNFAQLFAQVQGEIPGSPIFIMKLAGNARHLEVQLLADQYGNAISLFGRDCSVQRRHQKIIEEAPVTIAKPDVFEQMEKAAVRLGKLVGYVSAGTVEYLYSHHDDQFYFLELNPRLQVEHPTTEMVSGVNLPAAQLQIAMGIPLHRIRDIRVLYGVQPNSASEIDFGFEHPTSLTSHRRPTPKGHVIACRITAENPDAGFKPSSGIMQELNFRSSTNVWGYFSVVSAGGLHEYADSQFGHIFAYGENRQQARKNMVIALKELSIRADFRSTVEYIIRLLETPDFEENTINTGWLDMLISKKLTAERPDTMLAVFCGAVTKAHMASLDCFQQYKQSLEKGQVPSKGSLKTVFTVDFIYEEVRYNFTVTQSAPGIYTLYLNGTKTQVGIRDLSDGGLLISIDGKSHTTYSRDEVQATRMMVDGKTCLLEKESDPTQLRSPSPGKLVNLLVENGDHLNAGDAYAEIEVMKMYMPLIATEDGHVQFIKQAGATLEAGDIIGILSLDDPSRVKHALPFNGTVPAFGAPHITGDKPVQRFNATKLTLQHILQGYDNQALVQTVVKDFADILNNPDLPYSELNSVLSALSGRIPQRLEASIHKLADESKAANQEFPAAQFEKLVEDFAREHITLQSEATAYKNSVAPLSSIFARYRNGLTEHAYSNYVELMEAYYDVEILFNQQREEEVILSLRDQHKDDLDKVLAVTLSHAKVNIKNNVILMLLDLINPVSTGSALDKYFTPILKRLSEIESRATQKVTLKARELLILCQLPSYEERQAQMYQILKNSVTESVYGGGSEYRTPSYDAFKDLIDTKFNVFDVLPHFFYHADPYIALAAIEVYCRRSYHAYKILDVAYNLEHKPYVVAWKFLLQTAANGIDSNKRIASYSDLTFLLNKTEEEPIRTGAMTACNSLADLQAELPRILTAFEEEPLPPMLQRNAAPKEERMENILNIAVRADEDMDDTAFRTKICEMITANADAFRQAHLRRLSVVVCRDNQWPDYYTFRERENYQEDETIRHIEPAMAYQLELARLSNFDIKPCFIENRQMHVYYAVAKENPSDCRFFIRALVRPGRVKSSMRTADYLISESDRLLTDILDTLEIVSHEYKNSDCNHLFINFIPTFAIEADDVEHALKDFVDRHGKRLWKLRVTGAEIRFNVQSKKPDAPIIPMRFTVDNVSGFILKVEVYQEVKTEKSGWILKSVNKIPGAMHMQPLSTPYPTKEWLQPRRYKAHLMGTTYVYDFPELFRQSVQNQWTQAIKRNPLLKQPSHLVEAKELVLDEDDVLQEIDRAPGTNTVGMVAWIMTIRTPEYPSGRRIIAIANDITFKIGSFGVAEDQVFYKASELARALGIPRIYLSANSGARIGLAEELISQFRAAWKDASNPTAGFNYLYLTPAEYDTLVQQGDAKSVLVEEIQDEGETRLRITDVIGHTDGLGVENLKGSGLIAGATSRAYDDIFTITLVTCRSVGIGAYLVRLGQRTVQNEGQPIILTGAPALNKVLGREVYTSNLQLGGTQIMYKNGVSHLTAENDLEGIAKIVQWLSFVPDVRNAPVSMRLGVDPIDRDIEYTPPKGPSDPRFFLAGKSENGKWLSGFFDQDSFIETLSGWARTVVVGRARLGGIPMGVVSVETRTVENIVPADPANSDSTEQVFMEAGGVWFPNSAYKTAQAINDFNKGEQLPLMIFANWRGFSGGQRDMYNEVLKYGAQIVDALSNYKQPVFVYIIPNGELRGGAWVVVDPTINKDMMEMYADNNARGGVLEPEGIVEIKYRKPALLATMERLDATYASLKKQLAEEGKSDEEKAALKVQIEAREQELLPVYQQISIQFADLHDRAGRMKAKGVIRKALDWRRARHYFYWRVRRRLCEEYTFRKIVAATSAAPMSREQMLDLVKQWFTSDNETASFEDADELVSEWFEKRASVIDQRISKLKSDATKEQVVSLGNADQEAVIEGFTQLIENLSEDQRAEILRKLNSRF

SEQ ID NO: 104 - protein, 2233 aa, Artificial Sequence
  ACC1sc
MSEESLFESSPQKMEYEITNYSERHTELPGHFIGLNTVDKLEESPLRDFVKSHGGHTVISKILIANNGIAAVKEIRSVRKWAYETFGDDRTVQFVAMATPEDLEANAEYIRMADQYIEVPGGTNNNNYANVDLIVDIAERADVDAVWAGWGHASENPLLPEKLSQSKRKVIFIGPPGNAMRSLGDKISSTIVAQSAKVPCIPWSGTGVDTVHVDEKTGLVSVDDDIYQKGCCTSPEDGLQKAKRIGFPVMIKASEGGGGKGIRQVEREEDFIALYHQAANEIPGSPIFIMKLAGRARHLEVQLLADQYGTNISLFGRDCSVQRRHQKIIEEAPVTIAKAETFHEMEKAAVRLGKLVGYVSAGTVEYLYSHDDGKFYFLELNPRLQVEHPTTEMVSGVNLPAAQLQIAMGIPMHRISDIRTLYGMNPHSASEIDFEFKTQDATKKQRRPIPKGHCTACRITSEDPNDGFKPSGGTLHELNFRSSSNVWGYFSVGNNGNIHSFSDSQFGHIFAFGENRQASRKHMVVALKELSIRGDFRTTVEYLIKLLETEDFEDNTITTGWLDDLITHKMTAEKPDPTLAVICGAATKAFLASEEARHKYIESLQKGQVLSKDLLQTMFPVDFIHEGKRYKFTVAKSGNDRYTLFINGSKCDIILRQLSDGGLLIAIGGKSHTIYWKEEVAATRLSVDSMTTLLEVENDPTQLRTPSPGKLVKFLVENGEHIIKGQPYAEIEVMKMQMPLVSQENGIVQLLKQPGSTIVAGDIMAIMTLDDPSKVKHALPFEGMLPDFGSPVIEGTKPAYKFKSLVSTLENILKGYDNQVIMNASLQQLIEVLRNPKLPYSEWKLHISALHSRLPAKLDEQMEELVARSLRRGAVFPARQLSKLIDMAVKNPEYNPDKLLGAVVEPLADIAHKYSNGLEAHEHSIFVHFLEEYYEVEKLFNGPNVREENIILKLRDENPKDLDKVALTVLSHSKVSAKNNLILAILKHYQPLCKLSSKVSAIFSTPLQHIVELESKATAKVALQAREILIQGALPSVKERTEQIEHILKSSVVKVAYGSSNPKRSEPDLNILKDLIDSNYVVFDVLLQFLTHQDPVVTAAAAQVYIRRAYRAYTIGDIRVHEGVTVPIVEWKFQLPSAAFSTFPTVKSKMGMNRAVSVSDLSYVANSQSSPLREGILMAVDHLDDVDEILSQSLEVIPRHQSSSNGPAPDRSGSSASLSNVANVCVASTEGFESEEEILVRLREILDLNKQELINASIRRITFMFGFKDGSYPKYYTFNGPNYNENETIRHIEPALAFQLELGRLSNFNIKPIFTDNRNIHVYEAVSKTSPLDKRFFTRGIIRTGHIRDDISIQEYLTSEANRLMSDILDNLEVTDTSNSDLNHIFINFIAVFDISPEDVEAAFGGFLERFGKRLLRLRVSSAEIRIIIKDPQTGAPVPLRALINNVSGYVIKTEMYTEVKNAKGEWVFKSLGKPGSMHLRPIATPYPVKEWLQPKRYKAHLMGTTYVYDFPELFRQASSSQWKNFSADVKLTDDFFISNELIEDENGELTEVEREPGANAIGMVAFKITVKTPEYPRGRQFVVVANDITFKIGSFGPQEDEFFNKVTEYARKRGIPRIYLAANSGARIGMAEEIVPLFQVAWNDAANPDKGFQYLYLTSEGMETLKKFDKENSVLTERTVINGEERFVIKTIIGSEDGLGVECLRGSGLIAGATSRAYHDIFTITLVTCRSVGIGAYLVRLGQRAIQVEGQPIILTGAPAINKMLGREVYTSNLQLGGTQIMYNNGVSHLTAVDDLAGVEKIVEWMSYVPAKRNMPVPILETKDTWDRPVDFTPTNDETYDVRWMIEGRETESGFEYGLFDKGSFFETLSGWAKGVVVGRARLGGIPLGVIGVETRTVENLIPADPANPNSAETLIQEPGQVWHPNSAFKTAQAINDFNNGEQLPMMILANWRGFSGGQRDMFNEVLKYGSFIVDALVDYKQPIIIYIPPTGELRGGSWVVVDPTINADQMEMYADVNARAGVLEPQGMVGIKFRREKLLDTMNRLDDKYRELRSQLSNKSLAPEVHQQISKQLADRERELLPIYGQISLQFADLHDRSSRMVAKGVISKELEWTEARRFFFWRLRRRLNEEYLIKRLSHQVGEASRLEKIARIRSWYPASVDHEDDRQVATWIEENYKTLDDKLKGLKLESFAQDLAKKIRSDHDNAIDGLSEVIKMLSTDDKEKLLKTLK

SEQ ID NO: 105 - protein, 2266 aa, Artificial Sequence
  ACCyl
MRLQLRTLTRRFFSMASGSSTPDVAPLVDPNIHKGLASHFFGLNSVHTAKPSKVKEFVASHGGHTVINKVLIANNGIAAVKEIRSVRKWAYETFGDERAISFTVMATPEDLAANADYIRMADQYVEVPGGTNNNNYANVELIVDVAERFGVDAVWAGWGHASENPLLPESLAASPRKIVFIGPPGAAMRSLGDKISSTIVAQHAKVPCIPWSGTGVDEVVVDKSTNLVSVSEEVYTKGCTTGPKQGLEKAKQIGFPVMIKASEGGGGKGIRKVEREEDFEAAYHQVEGEIPGSPIFIMQLAGNARHLEVQLLADQYGNNISLFGRDCSVQRRHQKIIEEAPVTVAGQQTFTAMEKAAVRLGKLVGYVSAGTVEYLYSHEDDKFYFLELNPRLQVEHPTTEMVTGVNLPAAQLQIAMGIPLDRIKDIRLFYGVNPHTTTPIDFDFSGEDADKTQRRPVPRGHTTACRITSEDPGEGFKPSGGTMHELNFRSSSNVWGYFSVGNQGGIHSFSDSQFGHIFAFGENRSASRKHMVVALKELSIRGDFRTTVEYLIKLLETPDFEDNTITTGWLDELISNKLTAERPDSFLAVVCGAATKAHRASEDSIATYMASLEKGQVPARDILKTLFPVDFIYEGQRYKFTATRSSEDSYTLFINGSRCDIGVRPLSDGGILCLVGGRSHNVYWKEEVGATRLSVDSKTCLLEVENDPTQLRSPSPGKLVKFLVENGDHVRANQPYAEIEVMKMYMTLTAQEDGIVQLMKQPGSTIEAGDILGILALDDPSKVKHAKPFEGQLPELGPPTLSGNKPHQRYEHCQNVLHNILLGFDNQVVMKSTLQEMVGLLRNPELPYLQWAHQVSSLHTRMSAKLDATLAGLIDKAKQRGGEFPAKQLLRALEKEASSGEVDALFQQTLAPLFDLAREYQDGLAIHELQVAAGLLQAYYDSEARFCGPNVRDEDVILKLREENRDSLRKVVMAQLSHSRVGAKNNLVLALLDEYKVADQAGTDSPASNVHVAKYLRPVLRKIVELESRASAKVSLKAREILIQCALPSLKERTDQLEHILRSSVVESRYGEVGLEHRTPRADILKEVVDSKYIVFDVLAQFFAHDDPWIVLAALELYIRRACKAYSILDINYHQDSDLPPVISWRFRLPTMSSALYNSVVSSGSKTPTSPSVSRADSVSDFSYTVERDSAPARTGAIVAVPHLDDLEDALTRVLENLPKRGAGLAISVGASNKSAAASARDAAAAAASSVDTGLSNICNVMIGRVDESDDDDTLIARISQVIEDFKEDFEACSLRRITFSFGNSRGTYPKYFTFRGPAYEEDPTIRHIEPALAFQLELARLSNFDIKPVHTDNRNIHVYEATGKNAASDKRFFTRGIVRPGRLRENIPTSEYLISEADRLMSDILDALEVIGTTNSDLNHIFINFSAVFALKPEEVEAAFGGFLERFGRRLWRLRVTGAEIRMMVSDPETGSAFPLRAMINNVSGYVVQSELYAEAKNDKGQWIFKSLGKPGSMHMRSINTPYPTKEWLQPKRYKAHLMGTTYCYDFPELFRQSIESDWKKYDGKAPDDLMTCNELILDEDSGELQEVNREPGANNVGMVAWKFEAKTPEYPRGRSFIVVANDITFQIGSFGPAEDQFFFKVTELARKLGIPRIYLSANSGARIGIADELVGKYKVAWNDETDPSKGFKYLYFTPESLATLKPDTVVTTEIEEEGPNGVEKRHVIDYIVGEKDGLGVECLRGSGLIAGATSRAYKDIFTLTLVTCRSVGIGAYLVRLGQRAIQIEGQPIILTGAPAINKLLGREVYSSNLQLGGTQIMYNNGVSHLTARDDLNGVHKIMQWLSYIPASRGLPVPVLPHKTDVWDRDVTFQPVRGEQYDVRWLISGRTLEDGAFESGLFDKDSFQETLSGWAKGVVVGRARLGGIPFGVIGVETATVDNTTPADPANPDSIEMSTSEAGQVWYPNSAFKTSQAINDFNHGEALPLMILANWRGFSGGQRDMYNEVLKYGSFIVDALVDYKQPIMVYIPPTGELRGGSWVVVDPTINSDMMEMYADVESRGGVLEPEGMVGIKYRRDKLLDTMARLDPEYSSLKKQLEESPDSEELKVKLSVREKSLMPIYQQISVQFADLHDRAGRMEAKGVIREALVWKDARRFFFWRIRRRLVEEYLITKINSILPSCTRLECLARIKSWKPATLDQGSDRGVAEWFDENSDAVSARLSELKKDASAQSFASQLRKDRQGTLQGMKQALASLSEAERAELLKGL

SEQ ID NO: 106 - protein, 2243 aa, Artificial Sequence; identical to SEQ ID NO: 2
  ACC1ch

SEQ ID NO: 107 - protein, 1229 aa, Artificial Sequence
  HPDH-MCRbs
MTAGKGKGAKVDPAGGKAATGRLAGKVALVTGAAGNLGGAIIRRFIAEGATLVMTGRTKERLAAAKQALLDETGVEEARVFTVILDGADPDSVRAGIDQVRAALGRIDVLVNNAGSAGPRQTLENVPLTRAEMEANGDSETVADAMRNLLGVSWNLTRAAAPIMPVGASVVNISTIFSHTRYYGRTAYVVPKAALNALSQELAKELGASGIRVNTVFPGPIESERIRTVFAAMDALQGEPENSTANHFMGRMTLERAIGDAPKRKTLPVPGDIADACLFLASDESAALNGNEIDVTHGMQVRKDSRSTYMTRPSMRSLDGAGLTVLIAAGEAWEDALDMAKIQAACGARVLLGMTRQVDVAQAEARVKAQGAEEGLTIMRFNRAEPDGMEAAIRAYSDAHGAIHSAIVLPVKPAGHFGDSLVEASDAEVDALIDIELTGAIAVARTLRRYWKTCSDLMQDPRFVFMSGPSDGKGNKAGRILAAAIAQLITIWRDESRVDFAQGRQKRAAWGNQIVRYTNEEDENTRFAAGHATRIVFKEQKITETSLYLPANIGEETGARRAMLGFAENITGLHLGKVAMITGGSAGIGGQVARLLALAGAKVMMVARRASELEAARERIVGELQDVGFSGVERRVKIMADVDVSDFDSLRRAADATMAEFGRIDYLINNAGVAGAEDMVIDMSLDMWRWTLDANLISNYLLMHYVVPIMKRQGSGYILNVSSYFGGEKFLAVAYPNRADYAVSKAGQRAMVESFSRFLGPEIQVNAIAPGPVDGDRLSGTGGKPGLFLRRARLILENKRLNAIYAAVIESIREGAEVTHVLGRLARNDTGYLSHDRSTPDPLRLLCLELAREGDGICTWDRYLLTPDIAGRLLMRLASAGYLLAHEEWQQRSASAEGRTGWLLALPPDDMPYLPQERIGKEADKVGRGVLSQLHLGAMPKESEVAQATVFYLADRAVSGETFMPSGGLSVERSYTEREMFGSPKQERLEQMKGKTVWVIGEHLADYIAETANHLIGGLGVARLVLLTRSEAGGASVLALLDPEIAERVTVRLCGADVESAMDQALTDFGRPTTVVSTPMAGLPDRLFEDGAMLEPEEFRTLCEENLTQHFRVSRKASLYDGCQLVLVSPDVPFGQSGPAFALANFVKTTLHAFTATLAVENERLVHDVPTNQINLTRRVRSEEPRNAVEHQEELKRFARAVLLVGAPLPDAQDSRYRARIYRGTSMTV

SEQ ID NO: 108 - protein, 1220 aa, Artificial Sequence
  HPDH-MCRca
MSGTGRLAGKIALITGGAGNIGSELTRRFLAEGATVIISGRNRAKLTALAERMQAEAGVPAKRIDLEVMDGSDPVAVRAGIEAIVARHGQIDILVNNAGSAGAQRRLAEIPLTEAELGPGAEETLHASIANLLGMGWHLMRIAAPHMPVGSAVINVSTIFSRAEYYGRIPYVTPKAALNALSQLAARELGARGIRVNTIFPGPIESDRIRTVFQRMDQLKGRPEGDTAHHFLNTMRLCRANDQGALERRFPSVGDVADAAVFLASAESAALSGETIEVTHGMELPACSETSLLARTDLRTIDASGRTTLICAGDQIEEVMALTGMLRTCGSEVIIGFRSAAALAQFEQAVNESRRLAGADFTPPIALPLDPRDPATIDAVFDWGAGENTGGIHAAVILPATSHEPAPCVIEVDDERVLNFLADEITGTIVIASRLARYWQSQRLTPGARARGPRVIFLSNGADQNGNVYGRIQSAAIGQLIRVWRHEAELDYQRASAAGDHVLPPVWANQIVRFANRSLEGLEFACAWTAQLLHSQRHINEITLNIPANISATTGARSASVGWAESLIGLHLGKVALITGGSAGIGGQIGRLLALSGARVMLAARDRHKLEQMQAMIQSELAEVGYTDVEDRVHIAPGCDVSSEAQLADLVERTLSAFGTVDYLINNAGIAGVEEMVIDMPVEGWRHTLFANLISNYSLMRKLAPLMKKQGSGYILNVSSYFGGEKDAAIPYPNRADYAVSKAGQRAMAEVFARFLGPEIQINAIAPGPVEGDRLRGTGERPGLFARRARLILENKRLNELHAALIAAARTDERSMHELVELLLPNDVAALEQNPAAPTALRELARRFRSEGDPAASSSSALLNRSIAAKLLARLHNGGYVLPADIFANLPNPPDPFFTRAQIDREARKVRDGIMGMLYLQRMPTEFDVAMATVYYLADRNVSGETFHPSGGLRYERTPTGGELFGLPSPERLAELVGSTVYLIGEHLTEHLNLLARAYLERYGARQVVMIVETETGAETMRRLLHDHVEAGRLMTIVAGDQIEAAIDQAITRYGRPGPVVCTPFRPLPTVPLVGRKDSDWSTVLSEAEFAELCEHQLTHHFRVARKIALSDGASLALVTPETTATSTTEQFALANFIKTTLHAFTATIGVESERTAQRILINQVDLTRRARAEEPRDPHERQQELERFIEAVLLVTAPLPPEADTRYAGRIHRGRAITV

SEQ ID NO: 109 - protein, 1219 aa, Artificial Sequence
  HPDH-MCRcag
MSVTGRLAGKIALITGGAGNIGSEMTRRFLAEGATVIISGRNSAKLAALAERLRSEAGVPAKRIDLEVMDGSDPAAVRAGVAAIIGRHGHIDILVNNAGSTGAQRRLAEIPLNETDRDLDDEEALSTSVANLLGMAWHLMRILSPHMPPGSAIINISTIFSRAEYYGRIPYVVPKAALNTLTQIAARELGIRGIRVNTIFPGPIESERIQTVFQRMDQLKGRPEGDTASQFLATMRLYRANDQGQLERRFPTICDVADAAVFLASDEAAALTGETIEVTHGMELPTSSETSLLARTDLRTIDANGRTTLICAGDQIEEVMALTGMLRTCGSEVIIGFRSEAALAQFEQAIGESRRLAGESFIPPIALPIDLRNPSTIDALFDWAGENTGGIHAAVILPASGREPATQVIDIDDAHVQAFLNDEIVGSIIIASRLARYWQAQRIAPGARAREPRVIFLSNGASTAGNPYGRIQSAAIEQLIRVWRHEAALDYERATAAGERVLPAVWASQIVRFANRSLEGLEFACAWTAQLLHSQRRINEITLTIPADISATTGARSASVGWAESLIGLHLGKVALITGGSAGIGGQIGRLLALSGARVMLAARDPHKLEQIQATIRAELAEVGYTDVEERVQIAPGCDVSSEEQLVDLVERTLAAFGTVDYLINNAGIAGVEEMVIDMPVEGWRNTLYANLISNYSLMRKLAPLMKKQGSGYVLNVSSYFGGEKDAAIPYPNRADYAVSKAGQRAMAEVFARFLGPEIQINAIAPGPVEGDRLRGTGERPGLFARRARLILENKRLNELHAALITAARTDNRPMRELVELLLPNDVAALAQHPAAPDVLRTLAKRFQSEGDPAASSSSFLLNRSIAAKLLARLINGGYDLPADIFANLAVPPDPFFTRAQIDREARKVRDGIMGMLYLQRMPTEFDVAMATVYYLADRNVSGETFHPSGGLRYERTPTGGELFGLPAPERLAELVGSTVYLIGEHLTEHLNLLARAYLERYGARQVVMIVETEAGAEKMRHLLHDHVEAGRLPIIVAGDQIEAAIDQAIANYGRPGPVVCTPFRPLPSAPLVGRKDSDWSTVLSEAEFAELCEHQLTHHFRVARKIALSDGASLALVTPETTATSSTEQFALANFVKTTLHAFTATIGVESERTAQRILINQVDLTRRARAEEPRDPRERQQELERFIEAVLLVTAPLPPEADTRYAGRIHRGRAITV

SEQ ID NO: 110 - protein, 1231 aa, Artificial Sequence
  HPDH-MCRct
MRRTKPECLRRNESTMRLNGKVALITGAAGGIGSVVTRMYLREGARVAISSRSLERAEQFRAALMAEGFSGDDILPVAFASTDLAGMQTAIEAIAARWGGLDVLINNAGSAGAKQPLFRIPFTSEDLAQLAAEGFTETETMRESAANLLGMPWHLTRLALPYLRVGASIINVSTIFSRTNYYGRIPYVVPKSALNALSLGLAKQLGTTDRAVRVNTVFPGPIDSDRIRTVFGAMDRLKGVPEGTTAQEFFDIMILARARGGEAPTKCYPTQADVAHVILFLGSDESAAISGHNFEITHGMQVKAQSRTKLTAWPDQRLIDLSRRVVLIVGGEQVHDAVTIAASQQSYGASVILTFRQPEAVNTAKAQLESRGLNHSIAVTWLDPLRRESVTSVFDLIRERYHRLDTVIVFPAHAAGHYGPELIPDEPERIRQFTDEAILGTTAFAAQLSRFLLAFDAENELQEPVNVLFVTNEHDGATNAFEDIYRAAVEQLLRVWRHEDELQVAAGTRRFAVRTNQIVRYANAEPDNLKFTADWLATLANRVRIFDELNLYVPENIQRTTGKTELPRDIARTLLGLHIGKVAVITGGSAGIGGAIGHYLALSGAKVVLAARDAERLAALKREIVAELFAVGYPQPETRVETLANIDVADEEALGRLVKFALDKFGRIDFLINNAGIAGAEEMVVDLPLAAWRHTLKANLLSNYSLIYKIAPLMKKQGAGYILNVSSYFGGEKYVAVAYPNRSDYAVSKAGQRALAEILARHLGPEIQINALSPGPVEGKRLRGEGSRPGLYARRARLILENKRLNDIHDAVIRAWREGEAVKSTLGALAHNHFEDVLAAGPPEPVRRLITHLRAAAVNEGHSDSHYLMTRKIAEKLLHRLFEGGYLTSVEDREAFTLAFLRELPEPPDPFFDPKEIDREAERVQSGILTMLNLRRMPTEEEIAIATVFYLSDPNISGETLHPSGGLKFDRTVTEGEFYGLPRNEHLMELRRKNVLLIGDYLEEELRWLVGAFAIQLVVRNCIILTKTAERADSLRHYFSAQRLNNLHIFSAGANVEAAMDDLIRRFGHLDVVVSTPFDPLPLKPLAATDDWRGVLNEKDFEQLVETHITHHFRVAKKAALQDKSQIVLVTPKTSRNSSREEFALALFVKTTLHALTATLAVECERFTHHPTVNQVDLTRRARVEEPRNEREEREELERFVDAVLLAAAPAPEPEQSRYLSRIHRGNAITV

SEQ ID NO: 111 - protein, 1216 aa, Artificial Sequence
  HPDH-MCRgb
MNDMSDIPQDLLTQSIAGRRLDNKCIILTGAAGSIGSFITRQLLREGARVMLTGRDQSKLDDFIGDLVSEGFEETFMVSATGDCADPEVCREIVAKTVAAFGPIDVLVNNAGAAGPKFTLRDIPFTEAEQRAADSDQTMFDSAMNLLGAPWNMARAAAPHMSAGASIINVSTIFSRTHYYGRIPYVVPKSGLNALGKGLALELGEKQGIRVNTLFPGPIESERIESVFARMDELQGVEPGSTGKEFRDLMITTRTSDGGLEYKYPTPTDVASGIVWLASDESSALSGHHIEVTNGMQVPAQSRSQLVSWPDKRLEDLSGQVVLILGGDDYQEAVTFAERQIQSGARVMLAFRNLNTVGHARSLVQSRNLGDVQLSHLDPLRRESVDRSMQLIADHFGRLDGVILLPQKPNGEYGYSLTTANDEDVANFVRDEVVAPVAFASAFARNMDQLFAEGEPPAIVYVTNPSDRHGNLMNEIIRASVEALIRGWRHEDETLANTGELPWAVQPNQMVRYDTEDREALTFAADWAATLTNRVRKMDSINLWLPRSIKRSTGKSSMPSSISRVLPGLHKGRTAVITGGSLGIGLQLGRFLAIAGARVLLSARSEGKLAEARDEIVDELRNIGYPRPESRVTILGGIDVGDPDALDRLHDHAVAELGHVDFLINNAGISGAEEMVVDMTRADWDRTMEANLISNYSLIRKFSPAMKAGGKGSILNVSSYFGGEKYVAVAYPNRADYAVSKAGQRVLAEILSRHLGPEIQINALAPGPVDGARLRGSAEAPGLFDRRGRLVLENKRLNEVHKAILAGMSSGFDADGVMSLASNAVDSIDIDSLPKPVARLVLKIRDSGGMGNSSHYLMHMGIAAKLMTRLVRAGILSDEQREQFLGTFIDAPAPFFDFSETSKQAEQIETGILNRLHLHKMPTDEQVGLSTVFHLADDIVSGETFHPSGGLKFDRSVTEGELLLPPNETEVAKLKGKRIVLIGDSMRNELTHIANGFLAQNVEKLWVLTKTEDSANAMTHSVDNPHGIDIECRAIGDDLESSLDDILRNDGGYDVVVSSPFERLPLNALAANANEPWDRVLSDHEFRKLVHDQLTHHFRVARTSALVPNCQIVLITPDTSLASTREEFALALFVKNSLHAFTVTLGVEGERLPTVPAINQVQLTRRAHTEEPSNDQELEEEMTRLVHAVLQCSVPAPAPSDSRYLSKIFRGNAVTV

SEQ ID NO: 112 - protein, 1221 aa, Artificial Sequence
  HPDH-MCRot
MFMTRLNDKIALITGGAGTIGEVITRRYLEEGATVVMAGRNRDKLDRYRERLITEFHALPERVMVVRMDGSSNAEVRMGIAAVVAHFGRIDILVNNAGSAGARQRLPAIPLLRSELQADETETLADSIGNLIGITWNLIRAAAPFMPAGSSVINISTIFARTDYYGRIPYVVPKAALHALTLAAATELGERGIRVNQINPGPIDSDRIRTVFRRMDELKGVPEQSTADGFFQMMRLRRPNAEGDLVKGFPKTLDVANVAVFLGSAESAALSGETLDVTHGMAVPTESRTTLTSRPGLRAVDGSGHTTLICVGDQIEEAAALTGVLRACGAEVVIGFRSRAAIARFDHLIERGRHLPSQEHVAPVLLYLNPTEPESIDQALRWMATNLDLPTSVIILPAQRQPLPPSVVRASDEEVAYFLRDELSGMIVLASRLARFWQQATLAPGNAPIQPRVLFMTNPDDGQGNLYAEILRAGVEQLCRVWRHESQLDYTRLAQMDAHPPHIRPVWANQLVRFANNEQENLEYCCAWVAKILLSERTIEELNLYLPRQIGSTTGSRQPSFGWAENLIGLHLGKTALITGGSAGIGSQIARLLALSGARVMLCARDERKLIQMRDMIIAELTEVGYNQVESRVQICAGCDVGEEEQLEIAVQRTLDLFGHVDYLINNAGIAGAEEMVLDLPLEAWQRTLRTNLISNYSLIRKLAPQMKSRGSGYILNVSSYFGGEKYAAIPYPNRADYAVSKAGQRALGEALARLLGPEVQINAMAPGPVEGERLRGSGDRPGLFLRRGRLILENKRLNDLHATLIAAERETQVGMRDLLARLLHNDVCALIDDPAAPTHLRALAERIWEQSDPNSYARAFFMNANIATKLLARLFNADQIDAQTFHTSQPNLPPEPFFARTQIDREARRVRDGVMSMLYLQRMPTEFDVALATVYYLNDRSVSGETFHPSGGLRHERTPTGAELYGSPAPQRLASLAGSTVYLIGESMAAHLEALARAYIERYAATRVVLICATPAGVERFSHHLADHLASGALAILSAEEGIEAALSEALRRFGPPGPVVSTPFQPLPSQPLIGRNDSDWSTVLDVAGFSAMCEQQLTHHFRVTRKLSLVAGVSLVLVTPETDSHSSTEQFALANFVKTTLHAFTATVGVECERTAHRILVNQVDLGRQARAEEPRSPAEQAQEMERFIDAIMLTTAPIPAEEDNRYTGRIYRGRAITV

SEQ ID NO: 113 - protein, 1229 aa, Artificial Sequence
  HPDH-MCRrc
MSTVRRLEGKVALITGGAGNIGEVITRRFLAEGATVVITGRNAEKLAVYRRRLIDEERVAPERVVALRMDGSDIAQVRAGVAQIVHGGTDVPIPLHRIDILVNNAGSAGPRRRLVDIPLEPSEVQPPDSETLAQAVGNLVGITWNLTRAAAPHMPSGSSVINISTIFSRTDYYGRIAYVAPKAALNALSDGLARELGVRGIRVNTIYPGPIESERIYTMFQAMDALKGQPEGDTASGFLRMMRLSRIDQNGEVVKRFPSPVDVANTAVFLASDESAAFTGHAFEVTHGMEVPTESRTTFVSRPGLRSVDATGKVILICAGDQVDDAVALADTLRSCRATVVIGFRDPRALEKASVLLREPRHALAADMYGRPTMTAEARLVRLDPLDPRAAAQTLEQIHAELGAIHHAVVLPGQSRHAPSASLIEVDDQVVERFLHQELVGTIALARELARFWEEYPSGSSMHRVLFVSNPDDQQGNQYSHILRAAVEQLVRVWRHESEYDSVNPAHQQEGQSSAAVWANQLIRYVNNEMANLDFTCAWVAKLLGSDRRIAEINLYLPEEIVGTIGVHNPGFGWAESLFGLHMGKVALITGGSAGIGGQIGRLLALSGAHVMLAARNADQLEQMRASIVREVRDASYPDAESRVAIFPGSDVSDIDGLERLVNHTVRVFGKVDYLINNAGIAGAEEMVIDMPVDAWRHTLRANLISNYALLRRLAPQMKAAGGAYVLNVSSYFGGEKYVAIPYPNRSDYAVSKAGQRAMVESLARFLGPEIQINAIAPGPVEGERLKGAGSRPGLFMRRARLILENKRLNEVFAALLAARHEGATIADLLPDLFANDIQSIANSAAMPAPLRRLATMLRETSDAGGSAQSYLMNATIARKLLNRLENGGYITLHDRRALTVEPPEPFFTEAQIEREAIKVRDGILGMLHLQRMPTEFDVALATVFYLADRNVTGETFHPSGGLRFERTVTEGELFGKPGQQRLERLKGSVVYLIGEHLRQHLVLLARTFLDEIHVARVVLLTETTQAATDLAAELSDYEAAGRFVVIPTCGDIEGGIDRAMAEYGRPGPVISTPFRPLPDRALSARNGDWSSVLTTAEFEELVEQQITHHFRVARKAGLIEGANVTLVTPPTSARSTSEEFALANFVKTTLHALTATAGAESERTVPHVPVNQVDLTRRARSEEPRTPSEEEEELQRFVNAVLLTSAPLPTPLESRYRARIYRGNAITV

SEQ ID NO: 114 - protein, 1204 aa, Artificial Sequence
  HPDH-MCRsl
MNAMGKTETQGRLAGKVALITGAAGNLGGSIVRRYLAEGATVVMSGRDAARTQAALDAAVADVGGTASIVTMDGANIESVRAGIADVVARHGRIDVLVNNAGSAGPKQVLGDLPLLPEELEGTPDSETVGDAARNIMVVAWNLVRAAASAMGEGGSIINVSTIFSRTDYFGRAAYTVPKAALNILSKGIARELGTRGIRVNQLYPGPIASERIRTVFAAMDKLKGDDAGSTANHFFNLMALERSVGEDAKAKTFPTPADIANTCVFLGSDESAAFAAHDFEVTHGMAVPLESKSEFLHRPDLRAIDGDGHGILISAGNQLDDALAMAGLFAAQGSKVLLGFHAQAALDDAAERLPAGVKAVRFPRHDHMAMDAELARFTAHVAAIDGAIILPTRGPGYFHGALNEASDAAVERFVDDELEGAIAVARTLDRYWQQGQDLPGDPRVLFITNPDDGAGNGWADVGRAAIEELLRVWRDEARVAATQGKTPRPVWGNQIVRFGNNEPENRDFAAGHAARLLLGGRQIEPINLYIPASITKATGARRALAGTAENITGLHLGKVALITGGSAGIGGALARLLALAGAKVMMVARRESELDAARERIVGELQDIGFAGVERRVLTLAGIDVADMKSLKHAVDETVRAFGRIDYLINNAGVSGAEEMAVDMGVENFRHTQFANLISNYALMHMVVPMMRKQGSGYILNVSSYFGGEKYLAVSYPNRTDYAVSKSGQRAMVESMARHLGPEIQINAIAPGPVDGDRLAGLGGKPGLFERRGRLILENKRLNAVHSAVIKSVRAGGSVAQILFRLSRNDSVQLSHDKSNPQPLRDLALACAREGDESCCWDRFILTPVLAAKLLKRLRLGGWLIGTDWQSRDESDWLLRVPPDDMPWLPVAQIGREAAKVRGGVLSQLHLGKMPTETEVAQATVFFLADRAVSGETFMPSGGLNVERSATERELFGSPKAERLAQMGGKTVWLVGEHLADYLGAAAQGFLNCDVARVVLITASAAGATAIKGHIGSGADRVESLLIDGEIETALDAALATWGHPTTIVSTPLKALPDQLFDADNPLDGDGFADVVEHNLTHHFRIARKVSLFDECQLVLVSPDVPMGEGAKGAFALANFVKTTLHAFTATIAVENERLVHEVAVNQINLTRRVRSEEPKNAAEHEEEVRRFARAVLLAGAPLPDAEDSRYRSRIYRGMSLTV

SEQ ID NO: 115 - protein, 1220 aa, Artificial Sequence
  HPDH-MCRca_(Variant_3)
MSGTGRLAGKIALITGGAGNIGSELTRRFLAEGATVIISGRNRAKLTALAERMQAEAGVPAKRIDLEVMDGSDPVAVRAGIEAIVARHGQIDILVNNAGSAGAQRRLAEIPLTEAELGPGAEETLHASIANLLGMGWHLMRIAAPHMPVGSAVINVSTIFSRAEYYGRIPYVTPKAALNALSQLAARELGARGIRVNTIFPGPIESDRIRTVFQRMDQLKGRPEGDTAHHFLNTMRLCRANDQGALERRFPSVGDVADAAVFLASAESAALSGETIEVTHGMELPACSETSLLARTDLRTIDASGRTTLICAGDQIEEVMALTGMLRTCGSEVIIGFRSAAALAQFEQAVNESRRLAGADFTPPIALPLDPRDPATIDAVFDWGAGENTGGIHAAVILPATSHEPAPCVIEVDDERVLNFLADEITGTIVIASRLARYWQSQRLTPGARARGPRVIFLSNGADQNGNVYGRIQSAAIGQLIRVWRHEAELDYQRASAAGDHVLPPVWANQIVRFANRSLEGLEFACAWTAQLLHSQRHINEITLNIPANISATTGARSASVGWAESLIGLHLGKVALITGGSAGIGGQIGRLLALSGARVMLADIQEDKLEQMQAMIQSELAEVGYTDVEDRVHIAPGCDVSSEAQLADLVERTLSAFGTVDYLINNAGIAGVEEMVIDMPVEGWRHTLFANLISNYSLMRKLAPLMKKQGSGYILNVSSYFGGEKDAAIPYPNRADYAVSKAGQRAMAEVFARFLGPEIQINAIAPGPVEGDRLRGTGERPGLFARRARLILENKRLNELHAALIAAARTDERSMHELVELLLPNDVAALEQNPAAPTALRELARRFRSEGDPAASSSSALLNRSIAAKLLARLHNGGYVLPADIFANLPNPPDPFFTRAQIDREARKVRDGIMGMLYLQRMPTEFDVAMATVYYLADRNVSGETFHPSGGLRYERTPTGGELFGLPSPERLAELVGSTVYLIGEHLTEHLNLLARAYLERYGARQVVMIVETETGAETMRRLLHDHVEAGRLMTIVAGDQIEAAIDQAITRYGRPGPVVCTPFRPLPTVPLVGRKDSDWSTVLSEAEFAELCEHQLTHHFRVARKIALSDGASLALVTPETTATSTTEQFALANFIKTTLHAFTATIGVESERTAQRILINQVDLTRRARAEEPRDPHERQQELERFIEAVLLVTAPLPPEADTRYAGRIHRGRAITV

SEQ ID NO: 116 - protein, 1220 aa, Artificial Sequence
  HPDH-MCRca_(Variant_6)
MSGTGRLAGKIALITGGAGNIGSELTRRFLAEGATVIISGRNRAKLTALAERMQAEAGVPAKRIDLEVMDGSDPVAVRAGIEAIVARHGQIDILVNNAGSAGAQRRLAEIPLTEAELGPGAEETLHASIANLLGMGWHLMRIAAPHMPVGSAVINVSTIFSRAEYYGRIPYVTPKAALNALSQLAARELGARGIRVNTIFPGPIESDRIRTVFQRMDQLKGRPEGDTAHHFLNTMRLCRANDQGALERRFPSVGDVADAAVFLASAESAALSGETIEVTHGMELPACSETSLLARTDLRTIDASGRTTLICAGDQIEEVMALTGMLRTCGSEVIIGFRSAAALAQFEQAVNESRRLAGADFTPPIALPLDPRDPATIDAVFDWGAGENTGGIHAAVILPATSHEPAPCVIEVDDERVLNFLADEITGTIVIASRLARYWQSQRLTPGARARGPRVIFLSNGADQNGNVYGRIQSAAIGQLIRVWRHEAELDYQRASAAGDHVLPPVWANQIVRFANRSLEGLEFACAWTAQLLHSQRHINEITLNIPANISATTGARSASVGWAESLIGLHLGKVALITGGSAGIGGQIGRLLALSGARVMLADVDTRKLEQMQAMIQSELAEVGYTDVEDRVHIAPGCDVSSEAQLADLVERTLSAFGTVDYLINNAGIAGVEEMVIDMPVEGWRHTLFANLISNYSLMRKLAPLMKKQGSGYILNVSSYFGGEKDAAIPYPNRADYAVSKAGQRAMAEVFARFLGPEIQINAIAPGPVEGDRLRGTGERGGLFGRRARLILENKRLNELHAALIAAARTDERSMHELVELLLPNDVAALEQNPAAPTALRELARRFRSEGDPAASSSSALLNRSIAAKLLARLHNGGYVLPADIFANLPNPPDPFFTRAQIDREARKVRDGIMGMLYLQRMPTEFDVAMATVYYLADRNVSGETFHPSGGLRYERTPTGGELFGLPSPERLAELVGSTVYLIGEHLTEHLNLLARAYLERYGARQVVMIVETETGAETMRRLLHDHVEAGRLMTIVAGDQIEAAIDQAITRYGRPGPVVCTPFRPLPTVPLVGRKDSDWSTVLSEAEFAELCEHQLTHHFRVARKIALSDGASLALVTPETTATSTTEQFALANFIKTTLHAFTATIGVESERTAQRILINQVDLTRRARAEEPRDPHERQQELERFIEAVLLVTAPLPPEADTRYAGRIHRGRAITV

SEQ ID NO: 117 - protein, 258 aa, Artificial Sequence
  BDHcm
MVNLQGKTALVTGSTSGIGLGIAEALGRAGANIVLNGFGDVDAALATIAATGAQSAHHPADMRKPDEIEAMIAMARERFGTVDVLVNNAGIQHVAQVEDFPAQKWDDILAINLTSSFHTTRHVIPAMRARNWGRIVNIASVHGLVGSAGKSAYVAAKHGLVGLTKVTALETAGTGITCNAICPGFVLTPLVAAQIDAIAKRDGISMEAARARLLSDKQPSGQFVTPEQLGNLVLMLCSPFGDQVRGAAWAMDGGWTAQ

SEQ ID NO: 118 - protein, 256 aa, Artificial Sequence
  BDHkp
MNLHGKTALVTGSTSGIGLGIAKVLAQAGAQLVLNGFGDSSHARAEVAALGKIPGYHDADLRDVGQIEAMMHYAESTFGGVDIVINNAGIQHVAPVEQFPVDKWNDILAINLSSVFHTTRLALPGMRQRNWGRIINIASVHGLVASKEKSAYVAAKHAVVGLTKTVALETARSGITCNAICPGWVLTPLVQQQIDKRIAEGVDPEQASAQLLAEKQPSGEFVTPQQLGEMALFLCSDAAAQVRGAAWNMDGGWVAQ

SEQ ID NO: 119 - protein, 370 aa, Artificial Sequence
  HBDHos
MQLFKLKTRLSKFDHFADFAREFKLSEHDLVITNEFLYEPFMKSLNLPCHFIMQEKFGLGEPSDKMMNTILKEVKGVGFDRVIAVGGGTVIDISKLFVLKGVEDVTEAFERKIPIVKEKQLVILPTTCGTGSEVTNISIAEITSKHTKMGLADDAIVADDAVLVPELLKGLPFKFYACSAIDALVHATESYVSPKSNPYTRLYCRAAIEIIIDVFQGIAANGPEYRFERLGDMLMASNYAGIAFGNTGVGAVHALSYPLGGSYHVPHGESNYQFFTEVFKLYNAKNPSGDIARLNDLLCVQLGVNENPYPVLDELLGKLIPKNKLRVYGMKPEEIQGFTSSVLQTQQRLLANNYVSLSEEEIREIYKVLY

SEQ ID NO: 120 - protein, 378 aa, Artificial Sequence
  HBDHps
MAFIYYVTQIQFEFGAVKLLKQECERVGITRPLIVTDPGVKAAGILQKALDALPGIAVTVFDQTPSNPTEAAVRAAAALYKAGGCDGLIAVGGGSAIDCAKGVAIAATHEGPLTTYATIEGGSPKISDRVAPLIAVPTTSGTGSEVARGAIIIVDDHRKLGFHSWHLVPKTAICDPELTLGLPAMLTAATGMDAIAHCMETFMSPAFNPPADGIGLDGLERGWSHIERATRDGSDREARLNLMSASMQGAMAFQKGLGCVHSLSHSLGGVDPRLHHGTLNAMFLPAVVRFNASAESVQKERRLDRMARAMGLRSGSDIPDAIKDMNARLGLPTGLAAMGVQRDWFDRIIVGALADHCHKTNPRLASPEEYREMLETSL

SEQ ID NO: 121 - protein, 288 aa, Artificial Sequence
  HIBADHas
MQTIGFIGLGVMGKSMARHLLRAGYSLVVYTRTKQKAEDILAEGALWKETVKDVAKAADVVMTMVGEPQDVEYVYFGDDGILAHAKRGTYVIDFTTSKPSLAVRIHEAAKEKGIFVLDAPVSGGDIGARDGTLSIMVGGDKEAFSACMPLLSHLGKNIVWQGEAGAGQHTKMCNQIAIATNMIGVCEALVYAEKAGLDPERVLRSISQGAASSWSLSNLAPRMLAGDFAPGFYVKHFIKDMGIALAEAETLGLSLPGLKLAKQLYESLAERGEEQSGTQALYKWYKEW

SEQ ID NO: 122 - protein, 296 aa, Artificial Sequence
  HIBADHbc
MEIAFIGLGNMGGPMAANLLKAGHALTVFDLDAHAVDAAVRAGAAAATSPRDAAARGSLIITMLPAAQHVRAVYLGDDGVLAGARAGATLIDCSTIDPGTVRAVADAAAQRDFPLADAPVSGGTGGAQAGTLTFMVGADGALFERIRPVLLDMGRNVVHCGGTGTGQIAKICNNLLLGISMMGVSEAMALGAALGIDPTVLAGIINTSTGRCWSSDAYNPYPGVSDTAPAARGYAGGFAANLMLKDLGLATEAARSAHQPVWMGALAQQLYQSMSQQGLGTLDFSACVKLYEAQPA

SEQ ID NO: 123 - protein, 295 aa, Artificial Sequence
  HIBADHma
MAKITFIGLGNMGGPMAGNLVKAGHEVTVFDLSKDAVAALVSEGAKTAGTAHEAASGAECVITMLPAGQHVEAVYLGDDGLLAKLPAGTLVIDSSTIAPETARGVAEVARAKDIPFLDAPVSGGVGGAKAGTLTFICGGSEEAFNKAKPILDTMGKNIFHAGDHGSGQVAKICNNMLLAILMSGTSEALALGVKNGLDPAVLSEIMKQSSGGNWALNVYNPWPGVMEGVPASRNYEGGFLVNLMTKDLGLAFDNAVKNQASIPMGSLARNLFQLHAGQGNGSLDFSSIQRLYKPE

SEQ ID NO: 124 - protein, 298 aa, Artificial Sequence
  HIBADHpa
MTDIAFLGLGNMGGPMAANLLKAGHRVNVFDLQPKAVLGLVEQGAQGADSALQCCEGAEVVISMLPAGQHVESLYLGDDGLLARVAGKPLLIDCSTIAPETARKVAEAAAAKGLTLLDAPVSGGVGGARAGTLSFIVGGPAEGFARARPVLENMGRNIFHAGDHGAGQVAKICNNMLLGILMAGTAEALALGVKNGLDPAVLSEVMKQSSGGNWALNLYNPWPGVMPQAPASNGYAGGFQVRLMNKDLGLALANAQAVQASTPLGALARNLFSLHAQADAEHEGLDFSSIQKLYRGKD

SEQ ID NO: 125 - protein, 295 aa, Artificial Sequence
  HIBADHxc
MSKIAFIGLGNMGGPMVANLIKAGHELRVFDLVHSALDTAHAAGAQVASSASDTLHGAEVVISMLPASKHVEGLYLGDAGILAHIPAGALVIDCSTIAPAMARTVATAAHARGLDMLDAPVSGGTAGAAAGTLTFIVGGAAQALERARPVLQAMGKNLFHVGDNGAGQVAKLCNNMALGVIMAATGEAIALGVAQGLDPAVLSQMMAVSTGRSWATEVCNPWPGVLENAPASRGYSGGFGNDLMLKDLGLVAEAAVQAGASIPLGELARNLYAMNSRAGNGALDFSSVVKLVAKV

SEQ ID NO: 126 - protein, 253 aa, Artificial Sequence
  HPDHam
MTQQTVFVTGASAGFGAAIARRFVAEGARVIAVARSEDKLEKLAGELGDAVLPVKLDVSDPEAVKEVVTNLPADWQQVDVLVNNAGLAKGLEPAHKADLQDWDEMIATNVRGLTHVTRALLPGMVERGRGHVINIGSIAGTYPYPGGNVYGATKAFVHQFSLNLRSDLHGTGVRVTNVEPGMVGGTDFSKVRFDGDQAKADKVYEGTTPLTAEDVAESVFWAANQPAHVNINVIELMPVVQSFSPLQIFRDNS

SEQ ID NO: 127 - protein, 550 aa, Artificial Sequence
  HPDHbs
MTAGKGKGAKVDPAGGKAATGRLAGKVALVTGAAGNLGGAIIRRFIAEGATLVMTGRTKERLAAAKQALLDETGVEEARVFTVILDGADPDSVRAGIDQVRAALGRIDVLVNNAGSAGPRQTLENVPLTRAEMEANGDSETVADAMRNLLGVSWNLTRAAAPIMPVGASVVNISTIFSHTRYYGRTAYVVPKAALNALSQELAKELGASGIRVNTVFPGPIESERIRTVFAAMDALQGEPENSTANHFMGRMTLERAIGDAPKRKTLPVPGDIADACLFLASDESAALNGNEIDVTHGMQVRKDSRSTYMTRPSMRSLDGAGLTVLIAAGEAWEDALDMAKIQAACGARVLLGMTRQVDVAQAEARVKAQGAEEGLTIMRFNRAEPDGMEAAIRAYSDAHGAIHSAIVLPVKPAGHFGDSLVEASDAEVDALIDIELTGAIAVARTLRRYWKTCSDLMQDPRFVFMSGPSDGKGNKAGRILAAAIAQLITIWRDESRVDFAQGRQKRAAWGNQIVRYTNEEDENTRFAAGHATRIVFKEQKITETSLYLP

SEQ ID NO: 128 - protein, 550 aa, Artificial Sequence
  HPDHca
MSGTGRLAGKIALITGGAGNIGSELTRRFLAEGATVIISGRNRAKLTALAERMQAEAGVPAKRIDLEVMDGSDPVAVRAGIEAIVARHGQIDILVNNAGSAGAQRRLAEIPLTEAELGPGAEETLHASIANLLGMGWHLMRIAAPHMPVGSAVINVSTIFSRAEYYGRIPYVTPKAALNALSQLAARELGARGIRVNTIFPGPIESDRIRTVFQRMDQLKGRPEGDTAHHFLNTMRLCRANDQGALERRFPSVGDVADAAVFLASAESAALSGETIEVTHGMELPACSETSLLARTDLRTIDASGRTTLICAGDQIEEVMALTGMLRTCGSEVIIGFRSAAALAQFEQAVNESRRLAGADFTPPIALPLDPRDPATIDAVFDWGAGENTGGIHAAVILPATSHEPAPCVIEVDDERVLNFLADEITGTIVIASRLARYWQSQRLTPGARARGPRVIFLSNGADQNGNVYGRIQSAAIGQLIRVWRHEAELDYQRASAAGDHVLPPVWANQIVRFANRSLEGLEFACAWTAQLLHSQRHINEITLNIPANI

SEQ ID NO: 129 - protein, 550 aa, Artificial Sequence
  HPDHcag
MSVTGRLAGKIALITGGAGNIGSEMTRRFLAEGATVIISGRNSAKLAALAERLRSEAGVPAKRIDLEVMDGSDPAAVRAGVAAIIGRHGHIDILVNNAGSTGAQRRLAEIPLNETDRDLDDEEALSTSVANLLGMAWHLMRILSPHMPPGSAIINISTIFSRAEYYGRIPYVVPKAALNTLTQIAARELGIRGIRVNTIFPGPIESERIQTVFQRMDQLKGRPEGDTASQFLATMRLYRANDQGQLERRFPTICDVADAAVFLASDEAAALTGETIEVTHGMELPTSSETSLLARTDLRTIDANGRTTLICAGDQIEEVMALTGMLRTCGSEVIIGFRSEAALAQFEQAIGESRRLAGESFIPPIALPIDLRNPSTIDALFDWAGENTGGIHAAVILPASGREPATQVIDIDDAHVQAFLNDEIVGSIIIASRLARYWQAQRIAPGARAREPRVIFLSNGASTAGNPYGRIQSAAIEQLIRVWRHEAALDYERATAAGERVLPAVWASQIVRFANRSLEGLEFACAWTAQLLHSQRRINEITLTIPADIS

SEQ ID NO: 130 - protein, 550 aa, Artificial Sequence
  HPDHct
MRRTKPECLRRNESTMRLNGKVALITGAAGGIGSVVTRMYLREGARVAISSRSLERAEQFRAALMAEGFSGDDILPVAFASTDLAGMQTAIEAIAARWGGLDVLINNAGSAGAKQPLFRIPFTSEDLAQLAAEGFTETETMRESAANLLGMPWHLTRLALPYLRVGASIINVSTIFSRTNYYGRIPYVVPKSALNALSLGLAKQLGTTDRAVRVNTVFPGPIDSDRIRTVFGAMDRLKGVPEGTTAQEFFDIMILARARGGEAPTKCYPTQADVAHVILFLGSDESAAISGHNFEITHGMQVKAQSRTKLTAWPDQRLIDLSRRVVLIVGGEQVHDAVTIAASQQSYGASVILTFRQPEAVNTAKAQLESRGLNHSIAVTWLDPLRRESVTSVFDLIRERYHRLDTVIVFPAHAAGHYGPELIPDEPERIRQFTDEAILGTTAFAAQLSRFLLAFDAENELQEPVNVLFVTNEHDGATNAFEDIYRAAVEQLLRVWRHEDELQVAAGTRRFAVRTNQIVRYANAEPDNLKFTADWLATLANRVRIFDELN

SEQ ID NO: 131 - protein, 248 aa, Artificial Sequence
  HPDHec
MIVLVTGATAGFGECITRRFIQQGHKVIATGRRQERLQELKDELGDNLYIAQLDVRNRAAIEEMLASLPAEWCNIDILVNNAGLALGMEPAHKASVEDWETMIDTNNKGLVYMTRAVLPGMVERNHGHIINIGSTAGSWPYAGGNVYGATKAFVRQFSLNLRTDLHGTAVRVTDIEPGLVGGTEFSNVRFKGDDGKAEKTYQNTVALTPEDVSEAVWWVSTLPAHVNINTLEMMPVTQSYAGLNVHRQ

SEQ ID NO: 132 - protein, 196 aa, Artificial Sequence
  HPDHed
MSEAITPGALETLFTGARTHNGWQNMPVSDETLREIYNLMKWGPTSANCSPARIVFVRSAEGKEKLRPALSSGNLEKTLTAPVTAIVAWDGEFYERLPELFPHGDAKSWFTASPALAEETAFRNSSLQAAYLIFACRALGLDTGPMSGFDRQKVDEAFFTGTTLKSNLLINIGYGDPGKLYGRLPRLDFDDACGLA

SEQ ID NO: 133 - protein, 550 aa, Artificial Sequence
  HPDHgb
MNDMSDIPQDLLTQSIAGRRLDNKCIILTGAAGSIGSFITRQLLREGARVMLTGRDQSKLDDFIGDLVSEGFEETFMVSATGDCADPEVCREIVAKTVAAFGPIDVLVNNAGAAGPKFTLRDIPFTEAEQRAADSDQTMFDSAMNLLGAPWNMARAAAPHMSAGASIINVSTIFSRTHYYGRIPYVVPKSGLNALGKGLALELGEKQGIRVNTLFPGPIESERIESVFARMDELQGVEPGSTGKEFRDLMITTRTSDGGLEYKYPTPTDVASGIVWLASDESSALSGHHIEVTNGMQVPAQSRSQLVSWPDKRLEDLSGQVVLILGGDDYQEAVTFAERQIQSGARVMLAFRNLNTVGHARSLVQSRNLGDVQLSHLDPLRRESVDRSMQLIADHFGRLDGVILLPQKPNGEYGYSLTTANDEDVANFVRDEVVAPVAFASAFARNMDQLFAEGEPPAIVYVTNPSDRHGNLMNEIIRASVEALIRGWRHEDETLANTGELPWAVQPNQMVRYDTEDREALTFAADWAATLTNRVRKMDSINLWLPRSIK

SEQ ID NO: 134 - protein, 252 aa, Artificial Sequence
  HPDHhw
MIVLVTGASSGFGRAIAKKFGENGHKVIALARRKERLQSLQKEIPYCEILPCDICDKKAVKQALEALPQDFKSIDILVNNAGLALGIEPAQMCDFKDWERMISVNVTALSYLTHLVLPQMVERKSGHIITLGSIAGKYPYPGGNVYGATKAFVKQFALGLRADLAGTNVRVSDIQPGLAESEFSLVRFKGDKKRANALYEGSNALQPQDIAEAVYWVATLPKHININTLEMMPTSQSFSTLAVHKEYSFLTK

SEQ ID NO: 135 - protein, 267 aa, Artificial Sequence
  HPDHka
MSQGRRAADRLAGKVVLITGASAGIGEATAWEYLFASNGQAKLILTARRLEKLAAIKEEMKKEYPNVKIHVAKLDVSNTEEIKSLLQCLPTEFKSIDILVNNAGKALGSEKVGDIAIEDIKGMMDTNVIGLINVTQAVLPILKEKNSGDIVNIGSVAGRDAYPTGSIYCASKFAVRAFTESLRKELLDTGIRVILIAPGLVETEFSLVRYKGDEKRANSVYEGITALEAEDVAELIVFSTSRKPNTVIADTLIFPTCQGSAFHVHRS

SEQ ID NO: 136 - protein, 314 aa, Artificial Sequence
  HPDHms
MTEKVSVVGAGVIGVGWATLFASKGYSVSLYTEKKETLDKGIEKLRNYVQVMKNNSQITEDVNTVISRVSPTTNLDEAVRGANFVIEAVIEDYDAKKKIFGYLDSVLDKEVILASSTSGLLITEVQKAMSKHPERAVIAHPWNPPHLLPLVEIVPGEKTSMEVVERTKSLMEKLDRIVVVLKKEIPGFIGNRLAFALFREAVYLVDEGVATVEDIDKVMTAAIGLRWAFMGPFLTYHLGGGEGGLEYFFNRGFGYGANEWMHTLAKYDKFPYTGVTKAIQQMKEYSFIKGKTFQEISKWRDEKLLKVYKLVWEK

SEQ ID NO: 137 - protein, 550 aa, Artificial Sequence
  HPDHot
MFMTRLNDKIALITGGAGTIGEVITRRYLEEGATVVMAGRNRDKLDRYRERLITEFHALPERVMVVRMDGSSNAEVRMGIAAVVAHFGRIDILVNNAGSAGARQRLPAIPLLRSELQADETETLADSIGNLIGITWNLIRAAAPFMPAGSSVINISTIFARTDYYGRIPYVVPKAALHALTLAAATELGERGIRVNQINPGPIDSDRIRTVFRRMDELKGVPEQSTADGFFQMMRLRRPNAEGDLVKGFPKTLDVANVAVFLGSAESAALSGETLDVTHGMAVPTESRTTLTSRPGLRAVDGSGHTTLICVGDQIEEAAALTGVLRACGAEVVIGFRSRAAIARFDHLIERGRHLPSQEHVAPVLLYLNPTEPESIDQALRWMATNLDLPTSVIILPAQRQPLPPSVVRASDEEVAYFLRDELSGMIVLASRLARFWQQATLAPGNAPIQPRVLFMTNPDDGQGNLYAEILRAGVEQLCRVWRHESQLDYTRLAQMDAHPPHIRPVWANQLVRFANNEQENLEYCCAWVAKILLSERTIEELNLYLPRQI

SEQ ID NO: 138 - protein, 271 aa, Artificial Sequence
  HPDHps
MSYGSKAAERLANKVILITGASAAAGIGAATAREFAEAAHGNIKLILTARRKDKLDALAKELTDKYDNIKVHTVALDVTKLESIGQFVKDLPQEFADIDVLVNNAGLALGRDPIGEILPEDIQGMFQTNVLGLITLTQAVLPIFKAKNSGDIVNLGSIAGRDPYPGGGIYCPTKAAVKSFSHVLRKELINTRIRVLEVDPGNVETEFSITRFKNDVDKAKAVYANTEPLVAEDIAEVIVFGITRKQNTVIAETLIFSTNQASASHLYKGQV

SEQ ID NO: 139 - protein, 249 aa, Artificial Sequence
  HPDHra
MIIFVTGATAGFGAEIARKFVKEGHKVIATGRRKERLDDLKAELGDALYAVELDVTNRASIEEAIASLPADWQNIDVLVNNAGLALGLEKADKASLEDWDKMIDTNTKGLVYMTRAVLPGMVERNTGHVINIGSTAGNWPYAGGNVYGATKAFVRQFSLNLRTDLHGTHVRVTNIEPGLCGGTEFSNVRFKGDDEKVSKTYDNTNPLTAADVAESVFWASTLPAHVNINSIEMMPVSQSLAGLQVHREG

SEQ ID NO: 140 - protein, 550 aa, Artificial Sequence
  HPDHrc
MSTVRRLEGKVALITGGAGNIGEVITRRFLAEGATVVITGRNAEKLAVYRRRLIDEERVAPERVVALRMDGSDIAQVRAGVAQIVHGGTDVPIPLHRIDILVNNAGSAGPRRRLVDIPLEPSEVQPPDSETLAQAVGNLVGITWNLTRAAAPHMPSGSSVINISTIFSRTDYYGRIAYVAPKAALNALSDGLARELGVRGIRVNTIYPGPIESERIYTMFQAMDALKGQPEGDTASGFLRMMRLSRIDQNGEVVKRFPSPVDVANTAVFLASDESAAFTGHAFEVTHGMEVPTESRTTFVSRPGLRSVDATGKVILICAGDQVDDAVALADTLRSCRATVVIGFRDPRALEKASVLLREPRHALAADMYGRPTMTAEARLVRLDPLDPRAAAQTLEQIHAELGAIHHAVVLPGQSRHAPSASLIEVDDQVVERFLHQELVGTIALARELARFWEEYPSGSSMHRVLFVSNPDDQQGNQYSHILRAAVEQLVRVWRHESEYDSVNPAHQQEGQSSAAVWANQLIRYVNNEMANLDFTCAWVAKLLGSDRRI

SEQ ID NO: 141 - protein, 322 aa, Artificial Sequence
  HPDHsi
MFIHMKSINKVAVVGAGIIGVGWTTLLLTKGYKVNLYTEKKETLEKGLAKVSAYLVNLKNLRMIDGEPIDYQRNLTGTTKIDEAIQNVEFVIEAIIEDYSAKKNLFNYLDSQLPRDIIIASSTSGLLMTEIQKAMTRYPDRGVIAHPWNPPHLLPLVEIVPGDKTSKYTLDVTKDFMEKLDRVVVVLKKEVPGFIGNRLAFALFREAVNLIDEGVATVEDIDKVMTAAIGLRWAFMGPFLTYHLGGGEGGIEYFFSKGFGYGANEWMYTLAKWDKFPYTAVKKIVDQMKEYEFIKGKNFQDLSRWRDETLVRVYKAVFGEKR

SEQ ID NO: 142 - protein, 550 aa, Artificial Sequence
  HPDHsl
MNAMGKTETQGRLAGKVALITGAAGNLGGSIVRRYLAEGATVVMSGRDAARTQAALDAAVADVGGTASIVTMDGANIESVRAGIADVVARHGRIDVLVNNAGSAGPKQVLGDLPLLPEELEGTPDSETVGDAARNIMVVAWNLVRAAASAMGEGGSIINVSTIFSRTDYFGRAAYTVPKAALNILSKGIARELGTRGIRVNQLYPGPIASERIRTVFAAMDKLKGDDAGSTANHFFNLMALERSVGEDAKAKTFPTPADIANTCVFLGSDESAAFAAHDFEVTHGMAVPLESKSEFLHRPDLRAIDGDGHGILISAGNQLDDALAMAGLFAAQGSKVLLGFHAQAALDDAAERLPAGVKAVRFPRHDHMAMDAELARFTAHVAAIDGAIILPTRGPGYFHGALNEASDAAVERFVDDELEGAIAVARTLDRYWQQGQDLPGDPRVLFITNPDDGAGNGWADVGRAAIEELLRVWRDEARVAATQGKTPRPVWGNQIVRFGNNEPENRDFAAGHAARLLLGGRQIEPINLYIPASITKATGARRALAGTAE

SEQ ID NO: 143 - protein, 288 aa, Artificial Sequence
  HPDHsm
MAILITGASSGFGAAMATAFVQAGYLVIGTARRTEKLADLHAKLGDRFQPITMDMTSKDDIQAALAHIQTLPEYFREIDCLINNAGLALGLDRADQADFTDWETMIQTNIIGLTYLTRQILPKMVENKRGYIINMGSIAGNYPYAGSNVYGATKAYVRQFSLNLRADLHGTGVRVTNIEPGLVEGSEFSNVRFKGDDKRAAQLYEYANALTSEDIAQTALWLYQRPAHMNVNTIELMPTTQSWAGMQVYKDTPPPPPPVVEPKPADFAPQPAPQEESGFFSKITSLFK

SEQ ID NO: 144 - protein, 318 aa, Artificial Sequence
  HPDHst
MRQIKTVSVIGAGVIGAGWSTLLALKGYENWFYTEKKETLDKGLAKIKGYLNVLYEYKLIDKEPDYYMQRIHPTTKLDEAISNTDFVLEAIVEEYGAKKALFKQLDEKLDKDVILASSTSGLLMTEIQKAMTKYPERGIIAHPWNPPHLLPLVEIVPGEKTSQDTIYATKDFMENKLERVVVVLKKEISGFIGNRLAFALFREAVYLVDEGIATVEDIDKVMTAAIGLRWAFMGPFLTYHLGGGEGGLEYFFSRGFGYGANEWMHTLAKYDKFPYTGVVKSVQQMKEYEFVKSKTFQELSRWRDEKLISLIKLLRGKI

1. A recombinant yeast comprising an active 3-hydroxypropionic acid (3-HP) biosynthetic pathway of [Pyruvate→Acetaldehyde→Acetyl-CoA→Malonyl-CoA→Malonate semialdehyde→3-HP], wherein the yeast comprises:
an exogenous gene encoding acetylating acetaldehyde dehydrogenase (AADH);
an endo- or exo-genous gene encoding acetyl-CoA carboxylase (ACC);
an exogenous gene encoding malonyl-CoA reductase (MCR); and
an exogenous gene encoding hydroxypropionate dehydrogenase (HPDH).

2. The recombinant yeast of claim 1, wherein said gene encoding AADH is a nucleic acid encoding AADH having an amino acid sequence of at least 80% sequence identity to an AADH amino acid sequence selected from the group consisting of amino acid sequences represented in Tables 1-3.

3. The recombinant yeast of claim 1, wherein said gene encoding ACC is a nucleic acid encoding ACC having an amino acid sequence of at least 80% sequence identity to an ACC amino acid sequence selected from the group consisting of amino acid sequences represented in Table 4.

4. The recombinant yeast of claim 1, wherein said MCR is bifunctional, in that the MCR simultaneously has a function of converting malonyl-CoA to malonate semialdehyde and a function of converting malonate semialdehyde to 3-HP.

5. The recombinant yeast of claim 4, wherein gene encoding said bi-functional MCR is a nucleic acid encoding MCR having an amino acid sequence of at least 80% sequence identity to a MCR amino acid sequence selected from the group consisting of amino acid sequences represented in Table 5.

6. The recombinant yeast of claim 1, wherein said MCR is mono-functional, in that it has a function of converting malonyl-CoA to malonate semialdehyde; and wherein the recombinant yeast further comprises a gene encoding an enzyme which can convert malonate semialdehyde to 3-HP.

7. The recombinant yeast of claim 6, wherein gene encoding said MCR is a nucleic acid encoding MCR having an amino acid sequence of at least 80% sequence identity to a MCR amino acid sequence selected from the group consisting of amino acid sequences represented in Table 6.

8. The recombinant yeast of claim 6, wherein said gene encoding an enzyme which can convert malonate semialdehyde to 3-HP is a nucleic acid encoding an enzyme having an amino acid sequence of at least 80% sequence identity to a HPDH, HIBADH, HBDH or BDH amino acid sequence selected from the group consisting of amino acid sequences represented in Tables 7-10.

9. The recombinant yeast of claim 1, wherein the yeast is acid-resistant.

10. The recombinant yeast of claim 9, wherein the yeast is selected from the group consisting of Saccharomyces cerevisiae, Kazachstania exigua, Kazachstania bulderi, and Candida humilis.

11. A method of preparing 3-HP comprising:
(a) culturing the recombinant yeast of claim 1 in a medium including at least one carbon source, thereby producing 3-HP; and
(b) isolating 3-HP from the culture.

12. The method of preparing 3-HP of claim 11, wherein the carbon source is one or more selected from the group consisting of glucose, xylose, arabinose, sucrose, fructose, galactose, cellulose, glucose oligomers and glycerol.

13. The method of preparing 3-HP of claim 11, wherein culturing is performed at a pH in the range of 2.6 to 4.0.
